(19) United States
(12) Patent Application Publication
(10) Pub. No.: US 2007/0212700 A1
(43) Pub. Date: Sep. 13, 2007

(54) Methods of using and analyzing biological sequence data

(75) Inventors: Rama Ranganathan, Dallas, TX (US); William Russ, Dallas, TX (US); Christopher Larson, Dallas, TX (US); Rohit Sharma, Brookline, MA (US)

Correspondence Address: FULBRIGHT & JAWORSKI L.L.P., 600 CONGRESS AVE., SUITE 2400, AUSTIN, TX, 78701, US

(73) Assignee: THE BOARD OF REGENTS OF THE UNIVERSITY OF TEXAS SYSTEM

(21) Appl. No.: 11/518,590

(22) Filed: Sep. 7, 2006

Related U.S. Application Data
(60) Provisional application No. 60/714,675, filed on Sep. 7, 2005.

(51) Int. Cl. C12Q 1/68; G06F 19/00

(52) U.S. Cl. 435/6; 435/7.1; 702/19; 702/20

(57) ABSTRACT

Methods of using biological sequence data. Evolved biological sequences may be used to identify the defining biological characteristics of the sequences—the three-dimensional structure and biochemical function. Some of the present methods extract such information, use such information to predict functional mechanism, and/or use such information in the design of artificial biological sequences. Other methods are included, as are related computer readable media and computer systems.

### CROSS-REFERENCE(S) TO RELATED APPLICATION(S)

[0001] This application claims priority to U.S. Provisional Patent Application Ser. No. 60/714,675, filed Sep. 7, 2005, the entire contents of which are expressly incorporated by reference.

### REFERENCE TO COMPUTER PROGRAM LISTING APPENDIX

[0002] This application includes a computer program listing appendix, submitted on compact disc (CD). The content of the CD is incorporated by reference in its entirety and accordingly forms a part of this specification. The CD contains the following files:

| | |
|---|---|
| File name: SCAMC.txt | File Size: 16 KB |
| File name: SCAMCMASK.txt | File Size: 23 KB |
| Creation date for CD: | Sep. 7, 2006 |

[0003] The appendix to this specification contains computer-program source code that is the property of the assignee. Copies of the source code may be made as part of making facsimile reproductions of this specification, but all other rights in the source code are reserved. Those with skill in the art having the benefit of this disclosure will understand that the appended source code may be modified as necessary for use with operating systems other than the standard, UNIX-based operating system for which it is currently written. For example, the appended source code may be modified for use with any Microsoft Windows operating system.

### BACKGROUND

[0004] 1. Field

[0005] The present invention relates generally to the use of biological sequence data. For example, evolved biological sequences may be used to identify the defining biological characteristics of the sequences—the three-dimensional structure and biochemical function. The present invention relates to methods of extracting such information, to using such information to predict functional mechanism, and to using such information in the design of artificial biological sequences. The present invention also relates to comparing the functionality and folding of such designed biological sequences to those of known sequences. The present invention relates to computer readable media comprising machine readable instructions for carrying out at least the steps of any of the present methods. The present invention also relates to computing systems (e.g., one or more computers, circuits, or the like) that are programmed or operable to carry out at least the steps of any of the present methods. The present invention also relates to the compositions of matter (e.g., biological sequences) that are designed using one or more of the present methods.

[0006] 2. Description of Related Art

[0007] Classical studies show that for many proteins, the information required for specifying the tertiary structure is contained in the amino acid sequence. However, the potential complexity of this information is enormous, a problem that makes defining the rules for protein folding difficult through either computational or experimental methods.

[0008] A fundamental tenet of biochemistry is that the amino acid sequence of a protein specifies its atomic structure and biochemical function (Anfinsen, 1973). But exactly what information in the sequence of a protein is necessary and sufficient for producing the fold and its biological activity is unknown, despite considerable progress in understanding the mechanisms of protein folding (Daggett & Fersht, 2003; Dinner et al., 200; Dobson, 2003; Fersht & Daggett, 2002). The main problem is the vast potential complexity of cooperative interactions between amino acids—processes by which the free energy contribution of one residue depends on those of other residues (Hidalgo & MacKinnon, 1995; Horovitz & Fersht, 1992; Marqusee & Sauer, 1994). These amino acid couplings could be pairwise and local in the three-dimensional structure, but could also involve more complex cooperativities in which collections of residues interact through three-way or higher-order couplings (Chen & Stites, 2001; Klinger & Brutlag, 1994; LiCata & Ackers, 1995; Luque et al., 2002). Given that protein structures are typically compact and well-packed (Gerstein & Chothia, 1996; Richards & Lim, 1993), proteins could be dense and complex networks of inter-atomic interactions, requiring specification of a great number of mutual constraints between amino acid positions to define the fold.

[0009] In Suel et al., however, the authors suggest that the pattern of inter-residue interactions seems to be much simpler than expected. The interactions that were analyzed resulted from perturbations that were based on the conservation of specific amino acids within the alignment in question.

### SUMMARY

[0010] In one respect, some embodiments of the present methods comprise (a) testing the size and diversity of an alignment of a family of M biological sequences, each biological sequence having N positions, each position being occupied by one biological position element of a group of biological position elements; (b) calculating a statistical conservation value for each biological position element in a pair of biological position elements at different positions in the alignment; (c) measuring conserved co-variation between the biological position elements in the pair using the statistical conservation values.

[0011] In another respect, some embodiments of the present methods comprise (a) calculating a statistical conservation value for each biological position element in a pair of biological position elements at different positions in an alignment of a family of M biological sequences, each biological sequence having N positions, and each position being occupied by one biological position element of a group of biological position elements; (b) making a perturbation to the alignment that is not based on the conservation of a particular biological position element at a particular position, the perturbation yielding a subalignment having fewer than M biological sequences; and (c) calculating a statistical conservation value for each biological position element in a pair of biological position elements at the different positions in the subalignment.

[0012] Other embodiments of the present methods, along with embodiments of the present computer readable media and computer systems, are presented below.

### BRIEF DESCRIPTION OF THE DRAWINGS

[0013] The following drawings illustrate by way of example and not limitation. The patent or application file contains at least one drawing executed in color. Copies of this patent or patent application publication with color drawings will be provided by the Office upon request and payment of the necessary fee.

[0014] FIG. 1: A portion of the truncated alignment of WW sequences that has been restricted to have no two sequences with more than 90 percent pairwise identity. Position numbers are indicated above the sequences. Highly conserved positions 7, 30 and 33 are shaded. Sequences shown are SEQ ID NO. 141-160 (listed from top to bottom).

[0015] FIG. 2: Conservation pattern for the WW domain family. The magnitude of ΔE_{i,x}^{stat} values (described below) for all amino acids x is shown for each position i. Weakly conserved positions show low ΔE^{stat} values, whereas highly conserved positions (such as 7, 30 and 33, see FIG. 1) show high ΔE^{stat} values. Three moderately conserved positions (8, 23 and 29) are indicated by arrows. Sequence alignments for the WW domain family members are shown in FIGS. 43A-I.

[0016] FIG. 3: Fluctuation of perturbation vectors for three moderately-conserved positions within the working WW alignment. Shown are perturbation vectors for three positions with similar ΔE_{i,x}^{stat} values: glutamic acid at position 8, histidine at position 23, and threonine at position 29 (see arrows in FIG. 2).

[0017] FIG. 4: Evolutionary coupling in the WW domain. The magnitude of C_{i,x,j,y}^{ev} values (described below) for all amino acids x and y are shown for each pair of positions i and j, which are the rows and columns of the statistical coupling matrix (SCM) shown. The positions in the rows and columns are organized from N- to C-terminus going left to right, and from top to bottom. The secondary structure of the WW domain is indicated at the top and left, with arrows representing β-sheets. The C_{i,j}^{ev} values are represented on a color scale (right) from blue (0) to red (2). Circles indicate the C_{i,j}^{ev} between positions 8, 23 and 29.

[0018] FIG. 5: Clustering of the data in the SCM shown in FIG. 4. The C_{i,j}^{ev} values in the SCM matrix were clustered in both dimensions and re-displayed on a colorscale from blue (0) to red (2). The dendrogram at right indicates the linkage between matrix elements/locations (which represent position pairs). The sort order is indicated by the list of WW alignment (or sequence) positions next to the dendrogram. The numbering of the columns of the clustered matrix are identical to the numbering of the rows (such that the leftmost row is 13, and the rightmost row is 23). A single cluster, or group, of matrix elements comprising positions 3, 4, 6, 8, 21, 22, 23 and 28 of the WW alignment is separated from the rest by a primary root branch. These positions all have high coupling scores with similar patterns of evolutionary coupling to each other, and therefore comprise a network of evolutionarily-conserved couplings.

[0019] FIGS. 6A-C: A spatially distributed network underlying WW specificity. FIG. 6A: two views of the Nedd4.3 WW domain (in blue CPK), with residues comprising the cluster of eight co-evolving residues as red CPK with a transparent van der Waals surface. The cluster forms a physically connected network that links binding site residues at positions 21, 23, and 28 with the opposite side residues at positions 3 and 4 through a few intervening residues at positions 6, 8, and 22. FIG. 6B: the thermodynamic mutant cycle formalism for measuring energetic coupling between a pair of mutations. The method involves measuring equilibrium dissociation constants for peptide binding for four proteins: wild-type (WT), a mutation at one site (M1), a mutation at a second site (M2), and the double mutation M1, M2. The fold effect of M1 is calculated for the wild type background (X1) or for the background of the second mutation (X2). The thermodynamic coupling parameter Ω is defined as the ratio of these two fold effects (X1/X2)— the degree to which the effect of one mutation depends on the second. FIG. 6C: double mutant cycle analysis of co-evolving positions in the N39 (Nedd4.3) WW domain. The residues at positions 3, 8, 23, and 28 are shown in the same orientation as in panel A (right), with distances marked between β carbons of residues indicated by dashed lines. Alanine mutations at three of these sites (3, 8, 23) were made both singly and in combinations with an alanine mutation at 28. Peptide binding to wild-type and mutant WW domains was measured using isothermal titration calorimetery. Single mutations at all sites affect peptide binding (fold effect relative to wild-type in parentheses), and mutant cycle analysis demonstrates energetic coupling (Ω>1) between position 28 and positions 3, 8, and 23. Panels A and C were prepared with PyMOL (Delano, 2002).

[0020] FIG. 7: Conservation pattern for the PDZ domain family. Sequence alignments of the natural PDZ domains are shown in FIGS. 45A-E.

[0021] FIG. 8: The reduced cmr matrix (“cmr” is defined below) of C_{i,j}^{ev} values. The matrix is organized with rows and columns representing positions in the alignment from N- to C-terminus of the sequence. The secondary structure of the PDZ domain is shown on the top and left, with arrows representing β-sheets. The C_{i,j}^{ev} values are represented on a color scale (right) from blue (0) to red (1.2).

[0022] FIGS. 9A-C: Results of one version of the present statistical coupling analysis (SCA) for PDZ domains. FIG. 9A: the clustered cmr matrix, with C_{i,j}^{ev} values shown on the color scale shown in FIG. 8. Iterative clustering (Suel et al.) was used to condense the high coupling signals to a single branch of the dendrogram. Specifically, clustering was performed three times—rows and columns with strong signals were isolated from the initial clustered matrix (large white box) and re-clustered, causing the strong couplings to cluster inside the small white box. These rows and columns were re-clustered again, resulting in the dendrogram shown at the right. Sequence numbering is consistent with that reported in Lockless et al. (1999). FIGS. 9B and 9C: mapping the clusters of high coupling shows two contacting networks that line the base of the peptide binding pocket, continue through the core, and extend to the back surface on helix αA. The bottom cluster is mapped in FIG. 9B, and the upper group in FIG. 9C.

[0023] FIG. 10: Two-by-two contingency matrix for testing statistical significance of functional predictions in the PDZ domain using an embodiment of the present SCA. Of the 36 mutants tested by Skelton et al. (2003) that were in the alignment, 12 are part of the coupled network and 23 are not. Their results showed that of 13 mutants that had a significant effect on binding, 10 were on the network that was identified. Of the 23 that had no effect, only 2 were on the network that was identified. Using Fisher's Exact test, these results are significant at p=0.00006.

[0024] FIG. 11: Interaction of CDC42 with Par6. The crystal structure of CDC42 (grey space-filling model) bound to the Par6 PDZ domain (green cartoon) is shown (PDB accession 1NF3). The side chains of the strongly coupled network is shown as salmon space-filling. The network connects the Par6 interaction site with the peptide binding site.

[0025] FIG. 12: Conservation pattern of the caspase family.

[0026] FIGS. 13A-B: Results of one version of SCA for the caspase family of cysteine proteases. FIG. 13A: the cmr matrix is represented as a color scale from red to blue. FIG. 13B: heirarchical clustering reveals two sets of biological sequence positions with strong coupling values. The bottom cluster (red dendrogram) comprises positions 74, 78, 87, 131, 143, 152, 166, 171, 177, 178, 179, 184, 188, 218, 233, and 240. The upper cluster (blue dendrogram) comprises positions 68, 70, 72, 75, 90, 92, 97, 101, 104, 108, 140, 141, 142, 174, 181, 183, 185, 187, 214, 219, 223, 224, 225, 229, 232, 238, 239, 242, 245, 246, 265, 266, and 295. The positions numbers are the positions in the human caspase-7 protein, as numbered in the PDB file 1SHJ.

[0027] FIGS. 14A-F: A network of evolutionarily-coupled residues in the caspase family. FIG. 14A: the lower and upper strongly co-evolving clusters (red and blue surfaces, respectively) from FIG. 13B are mapped on the structure of human caspase-7 (PDB accession 1SHJ). The allosteric ligand, 2-(2,4-Dichlorophenoxy)-N-(2-mercapto-ethyl)-acetamid (DICA), is shown in orange space-filling. Protamer A (left) is shown as a cartoon representation, and protamer B (right) is shown in space-filling, indicating that the coupled residues are mostly buried. The active site cysteine is shown in green. FIGS. 14B-F: rotations of the right protamer shown in FIG. 14A, to highlight the limited solvent accessibility of the coupled network. FIGS. 14B-C show the bottom and top of the view shown in FIG. 14A. FIGS. 14D-F are 90° rotations about the vertical axis. The most extensive accessible surfaces are in the active site (FIG. 14B) and at the DICA binding site (FIG. 14D, DICA shown as orange sticks).

[0028] FIG. 15: Conservation pattern of the glycogen phosphorylase family. Several sites have very low conservation, indicating that the alignment is at statistical equilibrium.

[0029] FIGS. 16A-B: Results of one version of SCA for the glycogen phosphorylase family. The cmr matrix is shown on a colorscale from blue (0) to red (2.5) in both unclustered (FIG. 16A) and clustered (FIG. 16B) arrangements.

[0030] FIGS. 17A-F: Mapping of SCA results shown in FIG. 16B onto the structure of human liver glycogen phosphorylase B. FIG. 17A: the strongly co-evolving network (blue dendrogram from FIG. 16B) is shown as a blue surface. The left protamer is shown as a cartoon, and the left protamer as a space-filling model. Ligands are shown with space-filling atoms as well; PLP (an essential co-factor) in red, caffeine in cyan, AMP in pink, glucose in green, and the drug CP-403,700 in orange. Glucose lies in the active site, which is surrounded by the coupled network. The network also makes direct contact with all of the other ligands. FIGS. 17B-C show the bottom and top of the right protamer as shown in FIG. 17A. FIGS. 17D-F show views of the right protamer in FIG. 17A, in 90° rotations about the vertical axis. The structure is drawn from PDB accession 1EXV, except for the AMP ligand, which is overlayed from accession 1FA9.

[0031] FIGS. 18A-B: Vertical shuffling of the alignment destroys pairwise coupling. FIG. 18A: the cmr matrix for the working WW alignment. FIG. 18B: the cmr matrix for the vertically-shuffled alignment. Nearly 90,000 swaps were made between randomly-selected pairs of sequences at a randomly-selected position in the alignment. Both matrices have been sorted by rr_cluster_{—}2.m (provided below) to make visualization easier.

[0032] FIG. 19: Energy trajectory for the Monte Carlo simulation of WW domains. The system energy, eₙ, is plotted as a function of β (energy line). As the energy converges to a minimum value, the top-hit pairwise identity to natural WW domains increases, to a maximum value of 0.84. Vertical bars indicate points along the trajectory from which alignments were taken, at maximum identities of 52%, 55%, 60%, 70%, 80% (having corresponding eₙ values of 18114, 12602, 8171, 4528, and 2721) and at the final convergence point at 84% identity (having a corresponding eₙ value of 2116).

[0033] FIGS. 20A-F: Coupling recovers over the course of the Monte Carlo run. FIGS. 20A-F show cmr matrices on a color scale from blue (0) to red (2) for the maximum pairwise identities of 52%, 55%, 60%, 70%, 80% and 84%, respectively, shown in FIG. 19. Each matrix is labeled with the average maximum percent identity to natural WW domains (% ID) and energy (eₙ) of the alignment.

[0034] FIGS. 21A-C: Experimental evaluation of artificial proteins. Thermal denaturation studies for a representative sampling of WW sequences drawn from the natural alignment (FIG. 21A), the alignment with conservation preserved, but no coupling (IC, FIG. 21B), and for the artificial sequences drawn along the Monte Carlo trajectory at 60% maximal identity to natural WW domains (CC60 FIG. 21C). For natural and CC60 sequences, three sequences are shown that were highly stable, moderately stable, and unfolded. For IC sequences, melts of every soluble sequence (N=30) are overlaid in gray. Sequences are scored as natively folded if they show cooperative and reversible thermal denaturation. While natural and CC sequences include some that are folded, no IC sequences are folded. The sequence alignments of the natural WW domains used in the Monte Carlo method to generate the artificial sequences are shown in FIGS. 44A-C.

[0035] FIGS. 22A-F: Representative thermal denaturation curves for all sets of artificial sequences. Two folded domains were chosen from each set. FIG. 22A, CC52 (SEQ ID NO:1-20), FIG. 22bB CC55 (SEQ ID NO:21-40), FIG. 22C, CC60 (SEQ ID NO:41-60), FIG. 22D, CC70 (SEQ ID NO:61-80), FIG. 22E, CC80 (SEQ ID NO:81-100) and FIG. 22F, the fully converged set (CCconv) (SEQ ID NO:101-120). For each domain, forward (upper line in each plot) and reverse (lower line in each plot) melts are shown, where the temperature is increased from 4° C. to 90° C., or decreased from 90° C. to 4° C., respectively. In all cases shown, the denaturation curves show proteins that are stable and largely reversible, indicating natively folded proteins.

[0036] FIG. 23: Thermodynamic parameters for natural and artificial WW domains. The melting temperature (Tm) and change in enthalpy upon unfolding (ΔH) extracted from the melting curves is shown for all folded domains from each set: natural WW domains, open circles; CC52, purple; CC55, blue; CC60, green; CC70, orange; CC80, red; fully converged, black.

[0037] FIG. 24: The peptide binding surface of the WW domain contains two structurally-defined pockets, the X-Pro binding site (residues 19 and 30, in blue CPK), and a specificity site (residues 21, 23, and 26, in yellow). Shown is a ribbon and transparent molecular surface representation of the Nedd4.3 WW domain bound to a group I peptide (in green stick bonds, PDB 115H). The figure was prepared with PyMOL (Delano, 2002).

[0038] FIGS. 25A-D: Assays for binding affinity and specificity in WW domains. FIG. 25A: five N-terminal biotinylated oriented peptide libraries were constructed to present either a proline-only control (biotin-Z-GMAxxxxPxxxxAKKK (SEQ ID NO:162)) or the four different characteristic WW domain binding motifs: group I-oriented (biotin-Z-GMAxxxPPxYxxxAKKK-C (SEQ ID NO:163)), group II-oriented (biotin-Z-GMAxxxPPLPxxxAKKK (SEQ ID NO:164)), group III-oriented (biotin-Z-GMAxxxPPRxxxAKKK (SEQ ID NO:165)), and group IV-oriented (biotin-Z-GMAxxxxpSPxxxxAKKK (SEQ ID NO:166)), where Z is 6-aminohexanoic acid, pS is phosphoserine, and x denotes all amino acids except Cys. Binding to these peptides indicte affinity for the consensus motifes listed in FIG. 25A (SEQ ID NO:167-171). FIG. 25B: binding specificity of natural WW domains exhibiting four binding class-specificities to the peptide libraries in FIG. 25A. FIG. 25C: binding specificity of artificial WW domains from the CC55 set. Binding is reported in fold above background binding in the absence of target peptides. Shown are the mean and standard deviation of at least four independent assays. FIG. 25D: the binding specificity of additional artificial and natural WW domains.

[0039] FIG. 26 depicts a flowchart showing, in a broad respect, some embodiments of the present methods.

[0040] FIG. 27 depicts a flowchart showing, in another broad respect, some embodiments of the present methods.

[0041] FIG. 28: Top-hit sequence identity for alignments of artificial SH3 domains generated using the optimization algorithm with masks made at different standard deviation (sigma) cutoff levels. Points with errorbars indicate the mean and standard deviation of the top-hit identity at each cutoff level. Dark and light lines near top of plot show the mean and standard deviation of top-hit identity to natural sequences of an alignment generated with no mask (complete convergence on all pixels). Dark and light lines near lower end of plot indicate the mean and standard deviation of top-hit identity to natural sequences of an alignment of sequences with only the conservation pattern (and no coupling).

[0042] FIG. 29A: cmr matrix of the natural SH3 alignment. The sequence alignment on which the cmr matrix is based is shown in FIGS. 46A-RR:

[0043] FIG. 29B: cmr matrix of the randomized alignment based on the natural SH3 alignment.

[0044] FIG. 29C: cmr matrix of artificial SH3 sequences created using a version of the optimization algorithm that lacks a mask, and thus converges on all matrix elements.

[0045] FIGS. 29D-I: cmr matrices of the artificial SH3 sequences created using a version of the optimization algorithm that includes a mask, where different significance cutoffs were used for each mask.

[0046] FIG. 30A: cmr matrix of the natural SH3 alignment.

[0047] FIG. 30B: difference matrix calculated between the cmr matrix of FIG. 30A and the cmr matrix shown in FIG. 29B.

[0048] FIGS. 30C-I: difference matrices, respectively, between the cmr matrix shown in FIG. 30A and those shown in FIGS. 29C-I.

[0049] FIG. 31: plot showing comparable values to those in FIG. 28 that were determined using an alignment of natural Dihydrofolate Reductase sequences. The alignment of the natural Dihydrofolate Reductase used is shown in FIGS. 47A-RRRR.

[0050] FIG. 32A: cmr matrix of the natural Dihydrofolate Reductase alignment.

[0051] FIG. 32B: cmr matrix of the randomized alignment based on the natural Dihydrofolate Reductase alignment.

[0052] FIGS. 32C-H: cmr matrices of the artificial Dihydrofolate Reductase sequences created using a version of the optimization algorithm that includes a mask, where different significance cutoffs were used for each mask.

[0053] FIG. 33A: cmr matrix of the natural Dihydrofolate Reductase alignment.

[0054] FIG. 33B: difference matrix calculated between the cmr matrix of FIG. 33A and the cmr matrix shown in FIG. 32B.

[0055] FIGS. 33C-H: difference matrices, respectively, between the cmr matrix shown in FIG. 33A and those shown in FIGS. 32C-H.

[0056] FIG. 34: plot showing comparable values to those in FIGS. 28 and 31 that were determined using an alignment of natural SH2 sequences. The alignment of the natural SH2 sequences used is shown in FIGS. 48A-PPPPP.

[0057] FIG. 35A: cmr matrix of the natural SH2 alignment.

[0058] FIGS. 35B-G: cmr matrices of the artificial SH2 sequences created using a version of the optimization algorithm that includes a mask, where different significance cutoffs were used for each mask.

[0059] FIG. 36A: cmr matrix of the natural SH2 alignment.

[0060] FIGS. 36B-G: difference matrices, respectively, between the cmr matrix shown in FIG. 36A and those shown in FIGS. 35B-G.

[0061] FIG. 37: Conservation pattern for alignment of fluorescent proteins. The fluorescent proteins used in this analysis are listed in FIGS. 49A-L.

[0062] FIG. 38: cmr matrix of C_{i,j}^{ev} values for the alignment of fluorescent proteins, where the C_{i,j}^{ev} values are represented on a color scale (right) from blue (0) to red (1.2).

[0063] FIG. 39: the clustered cmr matrix, with C_{i,j}^{ev} values shown on the color scale shown in FIG. 38.

[0064] FIG. 40: enlarged detail view of a portion of the FIG. 39 matrix, showing one network of co-evolving positions.

[0065] FIG. 41: enlarged detail view of a portion of the FIG. 36 matrix, showing another network of co-evolving positions.

[0066] FIG. 42: mapping the positions identified in FIGS. 40 and 41 on the structure 1 GFL (GFP from Aequorea Victoria).

[0067] FIGS. 43A-I: sequence alignment of natural WW domains to which FIGS. 2-5 pertain.

[0068] FIGS. 44A-C: sequence alignment of the natural WW domains used in one of the optimization algorithms described below to generate artificial domains and to make FIGS. 21, 22, 23, and 25.

[0069] FIGS. 45A-E: sequence alignment of natural PDZ domains to which an embodiment of the present methods was applied.

[0070] FIGS. 46A-RR: sequence alignment of natural SH3 domains. Sequences shown are SEQ ID NO. 172-670 (listed from top to bottom).

[0071] FIGS. 47A-RRRR: sequence alignment of natural Dihydrofolate Reductase sequences.

[0072] FIGS. 48A-PPPPP: sequence alignment of natural SH2 domains.

[0073] FIGS. 49A-L: sequence alignment of fluorescent proteins.

### DESCRIPTION OF ILLUSTRATIVE EMBODIMENTS

[0074] The terms “comprise” (and any form of comprise, such as “comprises” and “comprising”), “have” (and any form of have, such as “has” and “having”), “contain” (and any form of contain, such as “contains” and “containing”), and “include” (and any form of include, such as “includes” and “including”) are open-ended linking verbs. As a result, a method, a computer readable media or a device/system (e.g. a computer system, a circuit, or the like) that “comprises,” “has,” “contains,” or “includes” one or more steps or elements possesses those one or more steps or elements, but is not limited to possessing only those one or more steps or elements. Likewise, an element of a device that “comprises,” “has,” “contains,” or “includes” one or more features possesses those one or more features, but is not limited to possessing only those one or more features. The term “using” should be interpreted in the same way. Thus, and by way of example, a step in a that includes “using” certain information means that at least the recited information is used, but does not exclude the possibility that other, unrecited information can be used as well. Furthermore, something that is configured in a certain way must be configured in at least that way, but also may be configured in a way or ways that are not specified.

[0075] The terms “a” and “an” are defined as one or more than one unless this disclosure explicitly requires otherwise. The terms “substantially” and “about” are defined as at least close to (and includes) a given value or state (preferably within 10% of, more preferably within 1% of, and most preferably within 0.1% of). The terms “protein” and “polypeptide” are used interchangeably and refer to amino acid polymers; however, they are not limited to natural amino acids, and may also comprise modified amino acids (e.g., phosphorylated, glycosylated, or acetylated amino acids).

[0076] The techniques set forth below represent examples of ways in which the present methods may be performed. Those of ordinary skill in the art will recognize that other techniques may be used without departing from the scope of the claims.

[0077] The present methods may be implemented using a single computer or using a distributed computing environment.

[0078] The present computer systems may comprise one or more computers, such as those those connected by any suitable number of connection mediums (e.g., a local area network (LAN), a wide area network (WAN), or other computer networks, including but not limited to Ethernets, enterprise-wide computer networks, intranets and the Internet).

[0079] 1.0 Testing an Alignment

[0080] The first step in some (but not all) embodiments of the present methods comprises testing the size and diversity of an alignment of a family of M biological sequences for size and diversity, each sequence having N positions, each position being occupied by one biological position element of a group of biological position elements. (In some embodiments of the present methods, no testing occurs.) Examples of suitable biological sequences include any that can be structurally aligned, whether through primary or tertiary structure, such as protein sequences and nucleic acid sequences. For protein sequences, the biological position elements are amino acids, and for nucleic acid sequences they are nucleic acids. In some versions of this step, the alignment used is the type known in the art as a multiple sequence alignment (MSA).

[0081] The alignment that is tested may reside as data on a computer system, such as in memory where the data has been loaded from a storage device, such as a disk drive, a USB drive, a CD, or the like. The data that represents the alignment may be organized in any suitable fashion (as may all the matrices discussed in this disclosure) that can be interpreted as having M rows (the biological sequences) and N columns (the biological sequence positions). For example, the data may be organized in look-up tables; or as a one-dimensional list of values that, by operation of an algorithm, is indexed as the elements in the alignment.

[0082] While alignment creation is not considered part of the present methods, those of ordinary skill in the art will recognize that there are many available techniques for creating alignments of biological sequences such as proteins. By way of example, Volume 266 of Methods in Enzymology (©1996) entitled “Computer Methods in Macromolecular Sequence Analysis” addresses the process of creating MSAs. For example, section III of this work, entitled “Multiple Alignment and Phylogenetic Trees,” addresses MSAs of biological sequences such as proteins and DNA.

[0083] Other works that address protein MSAs include “Gapped BLAST and PSI-BLAST: a new generation of protein database search programs” by Altschul et al., (1997); and “SCOP: a Structural Classification of Proteins database” by Hubbard et al., (1999). Works that address RNA MSAs include “The Ribonuclease P Database” by Brown (1999); “tRNAscan-SE: a program for improved detection of transfer RNA genes in genomic sequence” by Lowe et al., (1997); “Conservation of functional features of U6atac and U12 snRNAs between veterbrates and higher plants” by Shukla et al., (1999); and “The uRNA database” by Zwieb (1997).

[0084] Methods discussed in Volume 266 have been fundamental to a recognition of sequence homology as implemented in the BLAST® family of search tools, many of which—including versions of BLAST and PSI-BLAST (which also actually create alignments)—have existed in the art for several years; to the creation of phylogenetic trees for several years; and have been routine in the practice of molecular biology for guiding experimentation for several years.

[0085] Alignments such as MSAs (and, more specifically, protein MSAs) also may be created manually. Computer programs such as ClustalW (Thompson et al., 1994) also may be used to create biological sequence alignments such as protein MSAs.

[0086] The following specific steps may be performed on a Unix platform and used to create an alignment of biological sequences suitable for use with the present methods:

[0087] 1) Choose a starting biological sequence (or set of biological sequences) that is a representative of the family. The sequence should be formatted as a fasta file—such as the following, called input.seq:

>gi|49176138|ref|NP_416237.3| 6-
phosphofructokinase II [Escherichia coli K12]

(SEQ ID NO: 161)

MVRIYTLTLAPSLDSATITPQIYPEGKLRCTAPVFEPGGGGINVARAIAH
LGGSATAIFPAGGATGEHLV
SLLADENVPVATVEAKDWTRQNLHVHVEASGEQYRFVMPGAALNEDEFRQ
LEEQVLEIESGAILVISGSL
PPGVKLEKLTQLISAAQKQGIRCIVDSSGEALSAALAIGNIELVKPNQKE
LSALVNRELTQPDDVRKAAQ
EIVNSGKAKRVVVSLGPQGALGVDSENCIQVVPPPVKSQSTVGAGDSMVG
AMTLKLAENASLEEMVRFGV
AAGSAATLNQGTRLCSHDDTQKIYAYLSR

[0088] 2) Collect more representative biological sequences of the family using PSI-BLAST. PSI-BLAST finds a set of similar biological sequences and generates a profile to better represent the family. This profile is then used to search for more divergent sequences in an iterative process, as set forth in the following module:

```
blastpgp -i input.seq -o input.psi -j 50 -v 10000 -b 10000 -I T
blastpgp -i input.seq -o input.psi_6 -j 50 -v 10000 -b 10000 -I T -m 6
The arguments of blastpgp are:
-d Database [String]
-i Query File [File In] default = stdin
-o Output File for Alignment [File Out] Optional default = stdout
-j Maximum number of passes to use in multipass version [Integer]
default = 1
-v Number of one-line descriptions (V) [Integer]
  default = 500
-b Number of alignments to show (B) [Integer]
  default = 250
-I Show GI's in defines [T/F] default = F
-m alignment view options:
    6 = flat master-slave, no identities and blunt ends
```

[0089] The −j flag above dictates the maximum number of iterations to run, and is the main variable parameter in these commands. Often, sufficiently-large alignments are accessible with only a few rounds. Larger values tend to find more biological sequences, but risk including non-homologues. Choosing a value for the −j flag is somewhat heuristic. Values for the −v and −b flags are set arbitrarily large (so that they are not limiting).

[0090] 3) Generate a list of gi numbers and escores from the PSI-BLAST runs: blast2escore<input.psi>input.escore

[0091] 4) Generate an alignment of biological sequences, all with escores greater than 0.001:

escore2aln<input.escore input.psi_{—}6 0.001>input.psi_free

[0092] 5) Delete redundancy and spaces in the alignment:

pretty_aln<input.psi_free>input.free

[0093] 6) This procedure can be repeated, now using each of the biological sequences in input.free as the query for subsequent rounds of PSI-BLAST. This is called “transitive blast.” Afterwards, all of the biological sequences generated are combined into a single file: input_all.free.

[0094] 7) Turn the alignment into a list of fasta formatted sequences:

format<input_all.free fasta>input.fasta

[0095] 8) Generate an initial alignment, using PCMA (Pei et al., 2003):

pcma input.fasta

PCMA generates output in ClustalW format (.aln file), which is re-formatted to “free” format:

readprintali input.aln 10000>input2.free

[0096] 9) Delete redundancy and spaces in the alignment:

pretty_aln<input2.free>input2.freep

[0097] 10) Often, only a portion of the biological sequence is aligned with the query, leaving “jagged” ends in the alignment. The following module fills in the ends of biological sequences in the alignment, using biological sequence information from the database:

fill_ends<(database file) input2.freep>input3.free

[0098] 11) Reformat to fasta, re-align, and fill the ends again:

format < input3.free fasta > input3.fasta
pcma input3.fasta
readprintali input3.aln > input4.free
fill_ends < (database file) input4.free > input5.free

[0099] 12) Hand adjustments to the alignment may produce an even higher-quality alignment. Suitable hand adjustments can include the following:
[0100] A) 3D structure-based adjustment of the alignment: If some of the biological sequences in the alignment have known 3D structures, these can be used to modify the alignment. Structures may be aligned using their backbone atom coordinates—the biological sequence alignment is modified to agree with the structural alignment. There are software packages that facilitate this, such as Cn3D from NCBI. This has varying degrees of utility, depending on how many structures are available, and on how well they represent the sequence diversity in the alignment.
[0101] B) Secondary structure based adjustment of the alignment using known (or predicted) secondary structure for one (or several) members of the family. The following rules may be used:
   [0102] i) gaps are typically outside regions of secondary structure;
   [0103] ii) in the case of protein sequences, proline and glycine typically flank secondary structure elements;
   [0104] iii) in the case of protein sequences, hydrophobic amino acids are rarely in loops by themselves;
   [0105] iv) in the case of protein sequences, insert gaps into loops that flank beta sheets by splitting in half and moving to either side of the gap;
   [0106] v) in the case of protein sequences, surface-exposed beta strands usually have alternate hydrophobic/hydrophilic residues, and tend to contain beta-branched residues; and
   [0107] vi) in the case of protein sequences, alpha-helices tend to be amphipathic, having hydrophobic residues at positions i, i+3, i+4 and i+7. Helices tend to not have beta-branched amino acids.
[0108] C) In the case of protein sequences, sequence-based adjustment: residues with similar physical or chemical properties should be aligned with one another. Residues may belong to multiple “groups;” for instance, the group of small residues may comprise glycine, alanine and serine. But serine is also a potential H-bond donor, along with threonine. Threonine is a beta-branched amino acid, like valine and isoleucine. Other groups include amino acids with aromatic side-chains, charged residues, bulky residues, etc.

[0109] The alignment testing may be characterized in a broad respect as testing a “statistical coupling analysis criterion” of the alignment, which criterion may take the form of alignment diversity in one embodiment, and alignment size in another embodiment. Multiple criteria may be tested. Testing both such statistical coupling analysis criteria may be done to best ensure that the alignment is sufficiently large and diverse to accommodate the performance of some preferred embodiments of the present methods.

[0110] 1.1 Testing the Diversity of the Alignment

[0111] The diversity testing may be accomplished in different ways. In general, the diversity test should expose non-diverse alignments, which are alignments that lack one or more positions that are occupied by biological position elements at a frequency that is close to the mean frequency with which those biological position elements exist at that position or positions over a larger number of sequences than exist in the alignment in question. The more positions in an alignment that are occupied by biological position elements at a rate that is close to some average frequency determined over a larger number of sequences than exist in the alignment, the more diverse the alignment is.

[0112] In a preferred embodiment, the alignment should be sufficiently diverse that, in the case of protein sequences, the frequencies of amino acids at some sites (which also may be referred to as “positions” in this disclosure) in the alignment are similar to their mean values in all sequences contained in the non-redundant database of protein sequences as of the October 1999 release. For proteins, those mean values are referred to in this disclosure as “baseline mean frequencies.” The baseline mean frequencies for protein sequences are, in alphabetical order of single-letter amino acid code (ACDEFGHIKLMNPQRSTVWY): [0.072658, 0.024692, 0.050007, 0.061087, 0.041774, 0.071589, 0.023392, 0.052691, 0.063923, 0.089093, 0.023150, 0.042931, 0.052228, 0.039871, 0.052012, 0.073087, 0.055606, 0.063321, 0.012720, 0.032955].

[0113] Testing for such diversity may be accomplished by determining (e.g., calculating) an average conservation energy value (e.g., ΔE_{i,x}^{stat} or, even more generally, the frequency of a given biological position element at a given position), where i represents a position and x represents an amino acid (or, for example, a nucleic acid in the case of nucleic acid sequences), for some of the least conserved positions in the alignment (e.g., 5% of the least conserved but highly occupied (e.g., ≧85%) positions in the alignment). The algorithm for calculating ΔE_{i,x}^{stat} is provided below. In the case of protein sequences, values for ΔE_{i,x}^{stat} that are close to zero represent frequencies of amino acids within the alignment that are close to their respective baseline mean frequencies.

[0114] A similar technique may be used to test the adequacy of the diversity of other biological sequences, such as nucleic acid sequences (e.g., DNA and RNA). The baseline mean frequencies for such biological sequences may be any suitable values that are known and that are based on more sequences than exist in the alignment in question. One example of such a baseline mean frequency is based on the collection of biological sequences that comprises the database of all known and unique members of all families of a given kind of biological sequence.

[0115] 1.2 Testing the Size of the Alignment

[0116] The size testing of the alignment may be accomplished in different ways. In general, the alignment should be large enough that random elimination of sequences from the alignment does not change the biological position element frequencies at sites by more than a desired amount. The less change that occurs, the better.

[0117] One suitable criterion (others are possible) for an alignment that is sufficiently large is that if twenty-five percent of its sequences are eliminated randomly over many trials (e.g., 100 trials) and the average statistical conservation value (e.g., ΔE_{i,x}^{stat} or, even more generally, the frequency of a given biological position element at a given position) over the trials at the least conserved positions (e.g., the five least conserved sites on the alignment that also show at least 85 percent occupancy; another suitable measure is five percent of the sites in the alignment (starting with the least conserved) that show at least 85 percent occupancy) is within one standard deviation of the statistical conservation value (e.g., ΔE_{i,x}^{stat}) at each of those positions in the original alignment. Such an alignment may be said to be in a state of near statistical equilibrium. Such an alignment reflects near saturation mutagenesis through evolution, and is near stationary. In the case of protein sequences, amino acid distributions at sites of the alignment will show different magnitudes of conservation, reflecting the underlying evolutionary pressure.

[0118] Another suitable manner of testing the size of an alignment involves following the average statistical conservation value (e.g., ΔE_{i,x}^{stat}) at the least conserved sites (which require the most number of biological sequences to accurately represent) as a function of the random elimination of varying fractions of sequences from the alignment. For example, one may find the five least conserved sites on the alignment that also show at least 85 percent occupancy, and carry out the random elimination method embodied in the MATLAB file random_elim_dg.m provided below. Doing so returns the following data as well as a figure plotting the average ΔE_{i,x}^{stat} for these sites as a function of eliminating (e.g., randomly) various fractions of the initial alignment. Each data point represents the average of randomly eliminating a given fraction of the alignment a certain number of times, such as 100 or 10. The file random_elim_dg.m takes in: an alignment (A), given as biological sequences X having N positions, and returns: data_out, a matrix comprising the number of biological sequences remaining in the alignment upon elimination (column 1), the average ΔE_{i,x}^{stat} of the five selected sites for random elimination of that fraction of biological sequences (column 2), and the associated standard deviation (column 3). The “size” test may be described as testing the size of the alignment.

[0119] The MATLAB file, or module, random_elim_dg.m (which appears at the end of the description but before the claims under the general heading “COMPUTER PROGRAM LISTINGS”) is configured for protein sequences and represents one way to carry out the diversity and size tests described above.

[0120] 2.0 Calculating Statistical Conservation Values

[0121] The next step in some embodiments of the present methods involves calculating a statistical conservation value for each biological position element in a pair of biological position elements at different positions in the alignment. One such statistical conservation value is ΔE_{i,x}^{stat}, explained below. In other embodiments of the present methods, a statistical conservation value, such as ΔE_{i,x}^{stat}, is calculated for more than one pair of biological positions elements at different positions in the alignment up to each biological position element at each position in the alignment.

[0122] Performance of this step may, when implemented via a computer system, involve loading the validated alignment into MATLAB for processing, using the following m-file, which is configured for protein sequences:

get_seqs.m

function [labels,parent_seqs]=get_seqs(filename)
% usage: [seqID, alignment]=get_seqs(filename)
% imports an alignment in .free format. In this format, an alignment is
% represented as follows: in the case of protein sequence alignment,
each line should
%contain a seqID, a tab character,
% the sequence comprised of the 20 amino-acids and a gap denoted by a
% period or a dash. Each line is separated by a paragraph mark.
[labels,parent_seqs]=(textread(filename,‘%s%s’));
labels=char(labels);
parent_seqs=char(parent_seqs);

[0123] As the get_seqs.m module shows, the alignment should be in “free” format—a text file with each line containing a sequence label followed by a tab character, the amino acid sequence (in the case of a protein sequence alignment), and a carriage return. Gaps are represented as ‘.’ or ‘-’. The get_seqs.m module returns the labels and the alignment separately.

[0124] A preferred embodiment of the present methods has been performed on the WW domain. The WW alignment that was built and validated contains 400 sequences and 87 positions. The get_seqs.m file was executed for the WW domain using the following command:

[0125] [labels,ww]=get_seqs(‘aln90’);

[0126] In the case of protein sequences, the alignment may be truncated to the protein sequence for which a structure is available. For example, sequence number 79 in the WW domain alignment that was built corresponds to the WW domain of Pin1 (PDB accession 1F8A). Truncation may be done manually, using the following MATLAB command (which is itself a complete program/module):

[0127] ww_trunc=ww(:,find(ww(79,:)˜‘−’));

[0128] The resulting alignment, ww_trunc, has 400 sequences and 37 positions. The truncation process may be characterized as truncating the validated alignment, or, more specifically, as truncating the validated alignment to biological sequences for which a structure is available.

[0129] Biological sequences that display high pairwise identities most likely arise from organisms or genes that have recently diverged. Their sequences may be similar as a simple result of this evolutionary history rather than of energetic constraints on the biological position elements. To minimize artifacts arising from clades of highly similar sequences, the alignment may be trimmed of biological sequences with a target pairwise identity, such as biological sequences with greater than 90 percent pairwise identity, meaning that no two sequences share greater than 90 percent of the same biological position elements at their respective positions. The trimming process may be characterized as eliminating biological sequences from the alignment that have a pairwise identity that meets a pairwise identity criteria.

[0130] The m-file alnid2.m, provided below and which is configured for protein sequences, can be used to generate an alignment in which no two sequences share greater than 90 percent identity:

alnid2.m

```
function [new_aln,idkeeplist,idx]=alnid2(aln,cutoff);
% accepts an alignment, and a cutoff (fractional identity) and outputs an
% alignment of sequences were every sequence is less than cutoff top hit
% identity to any other sequence
idkeeplist = ones(size(aln,1),1);
for i = 1:size(aln,1)−1
  if round(i/10)==i/10
% disp(i)
  end
  for j = i+1:size(aln,1);
    s1 = aln(i,:);
    s2 = aln(j,:);
    h = (s1˜=‘−’) | (s2˜=‘−’); % only avoid sites with double gaps
    f = sum( (s1˜=s2) & h ) / sum(h);
    f= 1−f;
idx(i,j) = f;idx(j,i)=f;
    if (f > cutoff)
      idkeeplist(i)=0;
      j = i+1;
    end
  end
end
new_aln = aln(find(idkeeplist),:);
The alnid2.m file can be executed using the following command:
      ww90 = alnid2(ww_trunc,0.9);
```

The resulting alignment, ww90, has 292 sequences and 37 positions. The first 20 sequences of this alignment, which were used in the examples provided in this disclosure (also characterized as the “working WW alignment”), are shown in FIG. 1. The highly conserved positions (7, 30 and 33) are highlighted in yellow.

[0131] Calculating the statistical conservation values for each biological position element in the pair of elements is a predicate to measuring the conserved co-variation of those elements. The parameter ΔE_{i,x}^{stat}, which is the conservation of a biological position element x at position i, is one suitable parameter for quantitatively representing sequence conservation, where iε{1, 2, . . . , N} in an alignment of N positions. For a protein, xε{ala, cys, asp, . . . , tyr}. For a nucleic acid sequence comprising DNA, xε{A, T, G, C}, and for a nucleic acid sequence comprising RNA, xε{A,U,G,C}.

[0132] The parameter ΔE_{i,x}^{stat} is a measure of the evolutionary conservation of a given biological position element at a given biological sequence position in the alignment; it is a measure of the degree to which the observed probability of a biological position element at one position differs from that observed randomly as represented by a baseline mean frequency for that biological position element (defined above). The m-file dg.m (which appears at the end of the description but before the claims under the general heading “COMPUTER PROGRAM LISTINGS”) executes the following steps (for protein sequences), which represent one manner of calculating the parameter ΔE_{i,x}^{stat} for each biological position element x at each position i in the alignment, although in a broad respect the calculation may be made for only two different elements at two different positions:

[0133] 1) Calculate the frequency fᵢ^{x} of each biological position element x at each position iε{1, 2, . . . , N}:

$${f}_{i}^{x} = \frac{{m}_{i}^{x}}{M} ,$$

where mᵢ^{x} is the number of biological position elements x at position i in the alignment, and M is the total number of biological sequences in the alignment.

[0134] 2) Calculate the probability of each biological position element x at each position iε{1, 2, . . . , N} by taking the binomial probability pix of observing fᵢ^{x} given a baseline mean frequency of that biological position element x. The total number of biological sequences in the alignment may be arbitrarily normalized to a value z to make the conservation parameter comparable between different alignments that differ in the number of biological sequences they contain:

$${P}_{i}^{x} = \frac{z !}{( {zf}_{i}^{x} ) ! ( z - {zf}_{i}^{x} ) !} {{p}_{x}^{{zf}_{i}^{x}} ( 1 - {p}_{x} )}^{z - {zf}_{i}^{x}} ,$$

where pₓ is a baseline mean frequency of biological position element x, and zfᵢ^{x} is the number of biological sequences having biological position element x in a normalized version of the alignment having z biological sequences. For proteins, these values are provided in the dg.m file below. The parameter z may be any suitable value; it is taken as 100 in the dg.m file below.

[0135] 3) The conservation parameter ΔE_{i,x}^{stat} (which may also be characterized as a statistical parameter) of each biological position element x at each position i is calculated as the natural logarithm of the binomial probability Pᵢ^{x} relative to that observed overall in the alignment:

$$Δ {E}_{i , x}^{stat} = {γ}^{*} ln ( \frac{{P}_{i}^{x}}{{P}_{align}^{x}} ) ,$$

where P_{align}^{x} is the overall probability of biological position element x in the alignment, and γ* is an arbitrary unit of statistical energy.

[0136] These ΔE_{i,x}^{stat} at values may be arranged into a matrix of dimensions r×N, where r is the number of biological position elements in the group of biological position elements (e.g., 20 where the alignment contains naturally-occurring protein sequences and the group comprises all possible biological position elements). The group of biological position elements may be fashioned as desired. Thus, the group may comprise a subset of all amino acids in naturally-occurring protein sequences, such as aromatic residues (F, Y and W) or small residues (G, A and S). An r×N matrix contains all the ΔE^{stat} values for all biological position elements in the group at all positions in the alignment, and is referred to in this disclosure as the evolutionary conservation matrix. The following statement may be used to execute the m-file dg.m:

[0137] [DEmat,DEvec]=dg(ww90);

[0138] The dg.m file, which is configured for protein sequences, will generate two output variables: DEmat is the evolutionary conservation matrix. For the working WW alignment, the evolutionary conservation matrix has a size of 20 amino acids x 37 positions with elements of ΔE_{i,x}^{stat}. The dg.m file also returns DEvec, in which the evolutionary conservation matrix is reduced to a vector of size N positions (for the working WW alignment, N=37) by taking the magnitude of ΔE_{i,x}^{stat} values along the amino acid dimension. This vector can be displayed as a bar chart of ΔE^{stat} values, as shown in FIG. 2.

[0139] 3.0 Measuring Conserved Co-Variation of at Least Two Elements

[0140] The next step in some embodiments of the present methods involves measuring the conserved co-variation of the two biological position elements for which the statistical conservation values were calculated (see FIG. 26). The measuring may take place with respect to any two desired biological position elements at different positions in the alignment, up to all pairs of elements whose member elements are at different positions. The measuring may be characterized as calculating the conserved co-variation of the elements or the conserved co-evolution of the elements. The process of measuring conserved co-variation between biological position elements at two different positions also may be more broadly characterized as measuring the statistical coupling of two positions in the alignment to each other.

[0141] In a broad respect, one way to measure the conserved co-variation of a pair of biological position elements at different sites in the alignment includes making a perturbation to the alignment that is independent of the conservation of any particular sequence position or, more specifically, any particular biological position element at a particular position (see FIG. 27); and measuring the resulting change in conservation of the target biological sequences. Multiple such perturbations and measurements may be performed consistent with some embodiments of the present methods.

[0142] As a result of making such a “conservation-independent” perturbation, it is necessarily possible to attain a conserved co-variation score for any pair of biological position elements at any pair of sequence positions in an alignment. The same is not true when the perturbation style of Suel et al. is used, which perturbations are based on the conservation of a given biological position element at a given position.

[0143] In another broad respect, another way to measure the conserved co-variation of a pair of biological position elements at different sites in the alignment includes making a series of sufficiently small perturbations to the alignment and measuring the resulting change in conservation of the target biological sequences over the series of perturbations. The number of perturbations made may be related to the number of biological sequences in the alignment; thus, the number of perturbations made may, in different embodiments, include a number of perturbations equal to one percent up to an infinitely great percentage of the number of sequences in the alignment. The sequence or sequences eliminated in a given perturbation may be chosen randomly (e.g., using a random number generator).

[0144] In a more specific respect, the conserved co-variation of a pair of biological position elements at different positions in an alignment may be measured by carrying out one or more perturbations (e.g., of the type described above), determining the resulting difference in conservation of those elements between the parent alignment and perturbed (or sub-) alignment, and determining the similarity of the change in conservation in terms of direction and magnitude.

[0145] One way to determine a difference in conservation of a given biological position element at a given position comprises calculating a statistical difference parameter, such as ΔΔE_{i,x}^{stat} (described below). This parameter may be characterized as reflecting the change in the conservation (e.g., the ΔE_{i,x}^{stat} values) for a given biological position element x at a given position i after a perturbation to the alignment (e.g., the working WW alignment). One way to determine the similarity of the change in conservation between the biological position elements in a given pair of biological position elements x and y at two different positions iε{1, 2, . . . , N} and jε{1, 2, . . . , N} in the alignment in terms of direction and magnitude is to use a parameter such as C_{i,x,j,y}^{ev} (described below; the “ev” being shorthand for “evolution”). If the C_{i,x,j,y}^{ev} parameter is used and the alignment contains, for example, proteins sequences, then xε{ala, cys, asp, . . . , tyr} and yε{ala, cys, asp, . . . , tyr}.

[0146] Although different processes may be used (which may involve perturbations of different sizes and different numbers of perturbations), the preferred procedure for measuring the conserved co-variation of two biological position elements at two different positions (up to all pairs of elements at different positions) involves a leave-one-out process of perturbing the alignment. In the preferred process, each sequence is sequentially eliminated from the alignment, and the change in evolutionary conservation of a given biological position element x at a given position i for one sequence elimination is recorded in a “perturbation energy” value called ΔΔE_{i,x}^{stat}:

$$ΔΔ {E}_{i , x , δ m}^{stat} = ( Δ {E}_{i , x}^{stat} - Δ {E}_{i , x \vert δ m}^{stat} ) * \frac{M}{z} ,$$

where δm signifies the perturbation (e.g., the elimination of one sequence from the alignment in the preferred process), ΔE_{i,x}^{stat} is the conservation of biological position element x at position i, and ΔE_{i,x|δm}^{stat} is the conservation of biological position element x at position i given the perturbation. The ΔE^{stat} values are calculated as described above, and is a weighting factor that normalizes the perturbation energy for alignments of different size. As noted above, M/z is the total number of sequences in the alignment and z is an arbitrary normalization of alignment size that may be taken as 100, as described above.

[0147] This leave-one-out process may yield a vector of ΔΔE^{stat} values (characterizable as a “perturbation vector”), \vec{ΔΔE}_{i,x}^{stat}, for each biological position element x of interest at each position i of interest:

$${\vec{Δ Δ E}}_{i , x}^{stat} = \{ ΔΔ {E}_{i , x , δ m 1}^{stat} , ΔΔ {E}_{i , x , δ m 2}^{stat} , … , ΔΔ {E}_{i , x , δ mM}^{stat} \} .$$

[0148] This leave-one-out perturbation and co-variation measurement process is implemented in the m-file stat_fluc.m (which is configured for proteins and which appears at the end of the description but before the claims under the general heading “COMPUTER PROGRAM LISTINGS”), and may be executed using the following command:

[0149] perturbation_matrix=stat_fluc(ww90);

[0150] The stat_fluc.m file returns a set of values designated perturbation_matrix, which may be characterized as a matrix of size r biological position elements by N positions by M perturbations (for the WW alignment, 20 amino acids×37 positions×292 sequences) with elements of ΔΔE_{i,x}^{stat}. For the working WW alignment, there are 740 (20×37) \vec{ΔΔE}_{i,x}^{stat} perturbation vectors corresponding to each of the 20 amino acids at each of the 37 positions, where the process is applied, as it is in stat_fluc.m, to every pair of amino acids at different positions in the working WW alignment. Three such perturbation vectors are shown graphically in FIG. 3.

[0151] Each perturbation contributing to the vectors shown in FIG. 3 has one of two results. If the eliminated sequence includes residue x at position i (an E at position 8, for example) then the frequency of that residue decreases, causing a decrease in ΔE_{i,x}^{stat} and a positive ΔΔE_{i,x,δm}^{stat} value. Alternatively, if the eliminated sequence does not include residue x at position i, then the frequency of x increases and ΔΔE_{i,x,δm}^{stat} has a positive value. The similar magnitudes of the fluctuation upon perturbation for each of the three examples is a result of the similar conservation values for each of these sites.

[0152] The single-sequence eliminations from the working WW alignment represent subtle perturbations of the statistical structure of the working WW alignment in which sites that are not evolutionarily coupled are expected to show independent patterns of \vec{ΔΔE}ₛₜₐₜ fluctuations, and sites that are evolutionarily coupled are expected to show some mutual dependence in their fluctuations. To measure this evolutionary coupling for a pair of biological position elements x and y at a pair of positions i and j, the inner (or dot) product of the perturbation vectors \vec{ΔΔE}_{i,x}^{stat} and \vec{ΔΔE}_{j,y}^{stat} may be taken to yield the parameter C_{i,x,j,y}^{ev}:

$$\begin{matrix}{C}_{i , x , j , y}^{ev} = {\vec{Δ Δ E}}_{i , x}^{stat} \cdot {\vec{Δ Δ E}}_{j , y}^{stat} \\ = \vert {\vec{Δ Δ E}}_{i , x}^{stat} \vert \vert {\vec{Δ Δ E}}_{j , y}^{stat} \vert cos θ ,\end{matrix}$$

[0153] where θ is the angle between the two perturbation vectors in the M-dimensional space of all the perturbation trials. When the leave-one-out technique described above involves the measurement of conserved co-variation for multiple (up to all) pairs of biological position elements at different positions in the alignment, these C_{i,x,j,y}^{ev} values may be arranged into a dataset that may be characterized as a matrix having a size (or dimensions) T×T×u×u, where u is the number of biological position elements being compared at T different positions. In a preferred embodiment, T comprises N (the total number of biological sequences in the alignment) and u comprises r (the number of biological position elements in the group), such that the matrix has a size N×N×r×r. Such a matrix is referred to within this disclosure as a type of statistical coupling matrix (SCM), and its elements may be organized in any suitable fashion, such as in a look-up table of values or as a list of one-dimensional values that may be acted upon by a suitable algorithm to form the matrix.

[0154] The m-file global_sca.m, which appears below, is an example of a program configured to calculate the dot product of every pair of perturbation vectors that can be calculated after applying the leave-one-out technique to an alignment of protein sequences, such as the working WW alignment:

global_sca.m

```
function
[coupling_matrix_aa,coupling_matrix_res]=global_sca(randpert_mat);
[numaa, numpos, numtrials]=size(randpert_mat);
% amino_acids=(‘ACDEFGHIKLMNPQRSTVWY’);
coupling_matrix_aa = zeros(numpos, numpos, 20, 20);
coupling_matrix_res = zeros(numpos,numpos);
for m = 1:numpos
  site1 = squeeze(randpert_mat(:,m,:));
  for n = m:numpos
    site2 = squeeze(randpert_mat(:,n,:));
    coupling_matrix_aa(m,n,:,:) = site1*site2’;
    coupling_matrix_aa(n,m,:,:) =
squeeze(coupling_matrix_aa(m,n,:,:))’;
  end
end
coupling_matrix_aa=coupling_matrix_aa./numtrials;
for m=1:numpos
  for n=1:numpos
    coupling_matrix_res(m,n) =
sqrt(sum(sum(coupling_matrix_aa(m,n,:,:).\hat{ }2)));
  end
end
The global_sca.m file may be executed using the following command:
      [coupling_matrix_aa,coupling_matrix_res]=-
      global_sca(perturbation_matrix);
```

[0155] The file global_sca.m returns the variable coupling matrix_aa (“cma”), which is one SCM. For the working WW alignment, this matrix is of size 37 positions×37 positions×20 amino acids x 20 amino acids. As shown in FIG. 3, residues E8 and H23 have a similar pattern of fluctuation. The C_{i,x,j,y}^{ev} for this pair is 1.84. Residue T29 has an unrelated pattern of fluctuation (see FIG. 3), and a correspondingly low coupling score with E8 (0.33) and with H23 (0.37). The file global_sca.m also returns the variable coupling matrix_res (“cmr”), which is a reduced matrix (and another version of an SCM) of, in this case, N positions by N positions (for the working WW alignment, 37 positions×37 positions) that is generated by taking the magnitude of the C^{ev} values in the cma SCM along both amino acid dimensions, yielding a group of C_{i,j}^{ev} values. Both the C_{i,x,j,y}^{ev} values and the C_{i,j}^{ev} values may be characterized as C^{ev} values in this disclosure. The cmr matrix for the working WW alignment is the matrix shown in FIG. 4. This matrix is both square and symmetric. As a result of the symmetry, the conserved co-variation scores embodied by the C_{i,j}^{ev} values are symmetric with respect to each pair of scores. Thus, C_{i,j}^{ev}=C_{j,i}^{ev}. In the cma matrix, the C_{i,x,j,y}^{ev} values are symmetric, such that C_{i,x,j,y}^{ev}=C_{j,y,i,x}. Thus, in some embodiments of the present methods, measuring conserved co-variation between the biological position elements in a pair located at different positions using the statistical conservation values for those elements yields conserved co-variation scores for those elements that are symmetric.

[0156] In one respect, the C_{i,x,j,y}^{ev} parameter may be characterized as a measure of the statistical correlation between the occurrences of a pair of biological position elements at a pair of sequence positions, weighted by the conservation of each biological position element. In one respect, the C_{i,j}^{ev} parameter may be characterized as a measure of the statistical correlation between the occurrences of a pair of sequence positions, weighted by the conservation of each sequence position. As will be understood by those of ordinary skill in the art, a position in a given alignment may be characterized as conserved (at least to some degree) where the frequency of a biological position element at that position deviates from a baseline mean frequency. In general, a C^{ev} value may be characterized as a type of conserved co-variation or conserved co-evolution score.

[0157] 4.0 Analysis of the Information in a Statistical Coupling Matrix

[0158] The information in a given SCM having more than 2 dimensions may be more easily visualized by taking the magnitude of the correlated conservation score (e.g., the C^{ev} value) along one or more of the dimensions of the SCM. For example, the information in the 4-dimensional cma SCM described above may be reduced in size by taking the magnitude of the C^{ev} scores along the two amino acid dimensions, resulting in the cmr SCM shown in FIG. 4. In the example shown in FIG. 4, high values in the cmr SCM indicate co-evolution between two positions in the alignment (e.g., the working WW alignment).

[0159] 4.1 Clustering of Co-Evolving Pairs of Biological Sequences

[0160] Another step in some embodiments of the present methods comprises identifying multiple pairs (also characterizable as groups or clusters) of biological sequence positions that co-evolve, or co-variate, together. Such an identification involves at least two locations on, for example, the SCM shown in FIG. 4, because a given location on the SCM shown in FIG. 4 is an example of a single pair of positions that co-evolve together. One way to make such an identification includes the use of a clustering algorithm, such as an algorithm configured for two-dimensional hierarchical clustering, which can involve techniques developed for recognizing pattern similarities in large datasets. Such techniques were applied to a predecessor version of an aspect of the present methods in Suel et al.

[0161] As discussed below in section 4.2, clusters of evolutionarily-coupled positions may then be mapped on the 3D structure of the biological sequence in question in order (1) to determine functionally important biological sequence positions (e.g., in proteins), and (2) to identify potential communication mechanisms between functional positions.

[0162] One way to perform two-dimensional heirarchical clustering of a given SCM, such as the cmr matrix, includes three steps that are codified in the m-file rr_cluster_{—}2.m (provided below), using the following command:

[0163] [p_pos,1_pos,sort_pos,sorted]=rr_cluster_{—}2(cmr,1:37,2,rama_map,0);

[0164] 1) First, a set of distances between each pair of positions within the SCM is calculated. Each position i is represented by the vector of C_{i,j}^{ev} values for all positions j; in other words, each row (and column) of the SCM (e.g., the cmr matrix in FIG. 4) represents a position. The m-file rr_cluster_{—}2.m uses the MATLAB function pdist.m to calculate distances between positions; more specifically, it uses the city-block distance metric, which is known to those of ordinary skill in this art.

[0165] 2) The distances from pdist are used to generate a linkage map, using the MATLAB function linkage.m. In the m-file rr_cluster_{—}2.m, linkage is executed using the “complete” or “furthest neighbor” algorithm, which is known to those of ordinary skill in this art. The linkage is depicted using a dendrogram.

[0166] 3) The rows and columns of the SCM are then re-sorted according to the clustering pattern indicated by the linkage output.

[0167] The m-file rr_cluster_{—}2.m output comprises p_pos, which is the distance data from pdist; 1_pos, which is the linkage data; sort_pos, which is the order of positions in the linkage map; sorted, which is, in this example, the cmr matrix re-ordered by sort_pos. The resulting matrix and dendrogram for the working WW alignment is shown in FIG. 5. The m-file rr_cluster_{—}2.m appears below:

rr_cluster_2.m

```
function
[p_pos,l_pos,sort_pos,sorted]=rr_cluster_2-
(mat,pos_labels,max_scale,colormap_in,raw_ or_not);
% The program takes in SC matrix (mat), the position labels, a max_scale
% for linear mapping of the color map to DDEstat values,
% the colormap, and a flag (raw_or_not) that determines whether an
% unclustered version of the matrix is kicked out as well. Returns the
% distance matrices for positions (pdist output, p_pos), the clusters for
%positions (linkage output, l_pos), the sorted indices
% for positions (sort_pos), and figures of the clustered matrix, the
% position dendrogram, and if you choose, the unclustered matrix.
[x,y]=size(mat);
p_pos=pdist(mat,‘ci’);
if x>2
  l_pos=linkage(p_pos,‘co’);
  [a,b,sort_pos]=dend_rr(l_pos,pos_labels,1);
else
  sort_pos=[1 2];
end
sorted=mat(sort_pos,sort_pos);
if colormap_in==0
  map=‘jet’;
else
  map=colormap_in;
end
if max_scale==0
  figure;imshow(sorted,[0
max(max(mat)’)],‘InitialMagnification’,‘fit’);colormap-
(map);brighten(0);colorbar
else
  figure;imshow(sorted,[0
max_scale],‘InitialMagnification’,‘fit’);colormap-
(map);brighten(0);colorbar
end
if raw_or_not==1
  if max_scale==0
    figure;imshow(mat,[0
max(max(mat)’)],‘InitialMagnification’,‘fit’);colormap-
(map);brighten(0);colorbar
  else
    figure;imshow(mat,[0
max_scale],‘InitialMagnification’,‘fit’);colormap-
(map);brighten(0);colorbar
  end
end
```

[0168] Applied to the working WW alignment, the clustering achieved using rr_cluster_{—}2.m shows few pairs of coupled sequence positions (or matrix elements) that are strongly coupled; most pairs of sequence positions show low C^{ev} values. The clustering also reveals that matrix elements with high C^{ev} values exhibit a highly redundant pattern of coupling, and therefore group into a single, well-resolved cluster.

[0169] 4.2 Independent Components Analysis

[0170] As an alternative to clustering as a way to identifying multiple pairs of biological sequence positions that co-evolve, or co-variate, together, one may use Independent Components Analysis (ICA) and the related techniques of Eigenvalue Analysis or Principle Components Analysis. ICA is a statistical and computational technique for revealing hidden factors that underlie sets of random variables, measurements, or signals. ICA defines a generative model for the observed multivariate data, which is typically given as a large database of samples. In the model, the data variables are assumed to be linear or nonlinear mixtures of some unknown latent variables, and the mixing system is also unknown. The latent variables are assumed nongaussian and mutually independent, and they are called the independent components of the observed data. These independent components, also called sources or factors, can be found by ICA. In this disclosure, the independent components comprise groups of biological sequence positions that co-evolve, or co-variate, together.

[0171] Techniques for performing ICA on a given SCM, such as the cmr matrix, include those disclosed in U.S. Pat. No. 6,936,012, which is incorporated by reference. An ICA algorithm embodied in the FastICA package, a free (GPL) MATLAB program available on the Internet, may be used. This package implements the fast fixed-point algorithm for independent component analysis and projection pursuit. The newest version of FastICA is version 2.5, published on Oct. 19, 2005.

[0172] 4.3. Mapping Clusters onto a 3D Structure

[0173] Another step in some embodiments of the present methods comprises mapping clustered biological sequence positions, or groups of biological sequence positions identified using ICA, Principle Components Analysis or Eigenvalue Analysis, onto a 3D structure of a member of the family of biological sequences. The result of such mapping as applied to the working WW alignment is shown in FIG. 6A.

[0174] FIG. 6A shows that mapping the cluster of coupled biological sequence positions onto the 3D structure of a WW domain (Pin1, PDB accession 1F8A) produces an unexpectedly distributed picture of binding specificity in that WW domain. In this regard, the mapping is of the biological positions elements present at a given position in a given domain. Rather than being restricted to the ligand binding surface, the eight networked residues are organized into a physically contiguous network linking the primary specificity determining pocket (the residues at positions 21, 23, and 28) with residues on the opposite side (at positions 3 and 4) through a few intervening residues (at positions 6, 8, and 22). The co-evolution of these positions predicts that (1) some residues act at long-range in mediating peptide binding and (2) the networked amino acids act cooperatively in determining the binding free energy.

[0175] Previous mutagenesis studies already suggest that network residues at or close to the peptide binding surface (see positions 8, 21, 23, and 28) mediate binding specificity (Chen et al., 1997; Espanel and Sudol, 1999; Kasanov et al., 2001; Toepert et al., 2001), and structural work in the dystrophin WW domain provides a mechanistic understanding for the contribution of these residues in group I domains (Huang et al., 2000). To test more of the network for contribution to peptide binding, and to test the prediction of cooperative action, thermodynamic double mutant cycle analysis (Carter et al., 1984; Hidalgo and MacKinnon, 1995) was carried out to measure the energetic coupling between mutations at binding-site position 28 and positions 3, 8, and 23 in the Nedd4.3 WW domain. In the mutant cycle method, the effect of one mutation on the equilibrium dissociation constant for peptide binding is measured in two conditions: (1) the wild-type background

$$( X 1 = \frac{{K}_{d}^{M 1}}{{K}_{d}^{WT}} ) ,$$

and (2) in the background of a second mutation

$$( X 2 = \frac{{K}_{d}^{M 1 , M 2}}{{K}_{d}^{M 2}} )$$

(FIG. 6B). The ratio of these effects gives the coupling parameter Ω, a measure of the degree of interaction between the two mutations. If the two mutations are thermodynamically independent, the effect of the first mutation is the same in conditions 1 and 2, and Ω=1. If Ω≠1, then the two mutations act cooperatively.

[0176] Consistent with earlier studies (Kasanov et al., 2001; Huang et al., 2000), the E8A, H23A, and T28A mutations all affected binding of a PPxY-containing peptide (FIG. 6C). However, L3A also had a significant effect (5.15+/−0.99 fold) though located on the opposite surface from the peptide binding site. In addition, mutant cycle analyses for the T28A mutation with each of the three other mutations show Ω values that significantly differ from unity (FIG. 6C). Specifically, the effects of mutations at 3, 8, and 23 are either diminished (L3A and H23A) or abrogated (E8A) in the background of T28A. Thus, T28A is thermodynamically coupled to mutations at 3, 8, and 23. These results support the model that a distributed and cooperative network of residues predicted by use of the preferred embodiment (described above) of the present methods contributes to peptide recognition in the WW domain.

[0177] Statistical Coupling Analysis of the PDZ Domain

[0178] The process described in sections 1.0 through 3.0 above may be characterized as a type of statistical coupling analysis (SCA) that can be applied to a family of biological seqeunces. In addition to applying it to the WW domain, as detailed above, it has also been applied to the PDZ domain. PDZ domains are a family of protein interaction motifs that bind to the C-termini of their targets. The SCA-based analysis of the PDZ family that was performed (which included the validation of the alignment, the truncation of the alignment, and the trimming of the alignment) identified amino acids at different PDZ positions that are important for ligand binding and activity.

[0179] The PDZ alignment of 240 sequences and 129 positions that were validated were read into the m-file get_seqs.m using the following command:

[lab,aln]=get_seqs(‘pdz.free’);

[0180] The get_seqs.m file follows:

get_seqs.m

function [labels,parent_seqs]=get_seqs(filename)
% imports an alignment in .free format. In this format, an alignment is
% represnted as follows: each line should contain a seqID, a tab character,
% the sequence comprised of the 20 amino-acids and a gap denoted by a
% period or a dash. Each line is separated by a paragraph mark.
[labels,parent_seqs]=(textread(filename,‘%s%s’));
labels=char(labels);
parent_seqs=char(parent_seqs);

The alignment had gaps, and was visualized on the structure of PSD95 (PDB accession 1BE9). The alignment to the sequence shown in this structure was truncated to remove gaps, so that all positions in the alignment had a corresponding amino acid in the PDB file. Sequence number 79 in the alignment corresponded to the 1BE9 structure, so the following command (which comprises the program) was used:

[0181] taln=aln(:,find(aln(79,:)˜=‘−’));

[0182] The output taln is the truncated alignment with a size of 240 sequences×94 positions. Calculating the conservation pattern of the truncated alignment using dg.m provided above revealed that many positions have low conservation, and therefore the alignment has reached statistical equilibrium (see FIG. 7). The following command was used to execute the dg.m file provided above:

[0183] [DEmat,DEvec]=dg(taln);

As before, DEvec is the vector of ΔE^{stat} values generated by taking the magnitude of the ΔE_{i,x}^{stat} in DEmat. Plotting DEvec gives the bar chart in FIG. 7.

[0184] A cmr matrix like the one created for the WW domain was created for the PDZ domain, as shown in FIG. 8. As with the WW domain, the cmr matrix (one type of SCM) for the PDZ family shows sparse evolutionarily-coupled positions in the alignment (see FIG. 8). The following commands were used to the execute the stat_fluc.m and global_sca.m files for the PDZ alignment that was used:

perturbation_matrix=stat_fluc(at);
[coupling_matrix_aa,coupling_matrix_res]=global_sca-
(perturbation_matrix);

As before, the cmr matrix contained C_{i,x,j,y}^{ev} values that were reduced along both amino acid dimensions to give a series of C_{i,j}^{ev} values for all positions i and j.

[0185] The clustering technique described above in section 4.1 was applied to the cmr matrix shown in FIG. 8 to produce the matrix shown in FIG. 9A, which comprises a more detailed version of a SCA. That clustering reveals a small cluster of co-evolving positions (see FIG. 9A) that, when mapped on a 3D structure of the PDZ domain as shown in FIGS. 9B and 9C using the residues at those positions of the depicted domain, form a single continuous unit that involves residues in the peptide binding site, the core, and the back surface of the protein. In this case, three rounds of hierarchical clustering were applied (the ultimate result of which is shown in FIG. 9A), each time excluding the main cluster with the weakest C^{ev} signals. Such iterative clustering is described, for example, in Suel et al.

[0186] The importance of the coupled residues identified above are supported by a large-scale mutagenesis study in the Erbin PDZ domain. The study demonstrated that mutations of most of the highly-coupled residues identified above caused a significant effect on peptide binding activity (Skelton et al., 2003). In the Skelton study, a total of 36 conserved positions within the PDZ alignment were mutated to alanine, and tested for their effect on peptide binding. Of these 36, twelve of the residues were identified as being part of a coupled network using the clustering technique described above that produced the FIG. 9A results. Skelton showed that mutation of 10 of these 12 residues had an effect on the binding activity of the PDZ domain (see FIG. 10). In contrast, only 3 of the remaining 24 residues (not identified as being part of coupled network in FIG. 9A) had an effect on PDZ domain activity. This comparison demonstrates that the embodiment of SCA utilized as described above for the PDZ domain is more effective at correctly identifying residues important for protein domain folding and function than standard methods using only MSA data (p=0.00006 by Fisher Exact Test).

[0187] While the work in the Erbin PDZ domain provided an extensive mutagenesis-based test that confirms the predictive power of at least one embodiment of SCA, the study focused on the residues spatially close to the peptide binding site. Interestingly, SCA may also predict that some residues located far from the peptide binding site are also energetically coupled to ligand binding. Garrard et al. (2003) provides important evidence that supports predictions of long range biologically relevant interactions. These authors show that in the PDZ domain of Par6, a protein involved in epithelial tight junction formation, evolutionarily-coupled residues on the spatially distant helix αA comprise a binding site for an allosteric regulator known as CDC42 (FIG. 11). Furthermore, a mutation in the co-evolving network disrupts the allosteric regulation (Peterson et al., 2004). These data further demonstrate that SCA-based predictions may be used to identify structurally non-intuitive long-range allosteric mechanisms in proteins.

[0188] Statistical Coupling Analysis of the Fluorescent Protein Family

[0189] The version of SCA performed on the PDZ domain as described above was also performed on an alignment of 93 naturally occurring fluorescent proteins with no greater than 95% top-hit identity to each other. The discussion presented below pertains to positions in the alignment that are represented in the structure 1 GFL (GFP from Aequorea Victoria). The SCA performed included the validation of the alignment, the truncation of the alignment, and the trimming of the alignment.

[0190] The conservation pattern for this alignment, which was determined (e.g., calculated) using dg.m provided above, is shown in FIG. 37. Several positions show relatively low conservation (dEstat, which is ΔE^{stat}), which indicates that the sequences have had time to evolve away from one another. This suggests that biological position elements that are similar between proteins have been naturally selected to be this way.

[0191] A cmr matrix like the one created for the WW and PDZ domains was created for the alignment of fluorescent proteins, as shown in FIG. 38. As with the WW and PDZ domains, the cmr matrix for the fluorescent proteins shows sparse evolutionarily-coupled positions in the alignment, with a subset of positions that show similar patterns of strong coupling.

[0192] The clustering technique described above in section 4.1 was applied to the cmr matrix shown in FIG. 38 to produce the matrix shown in FIG. 39, which comprises a more detailed version of a SCA. FIG. 40 is an enlarged detail view of a portion of the matrix shown in FIG. 39, and reveals that positions 12, 18, 37, 42, 48, 52, 55, 57, 58, 59, 80, 83, 86, 88, 94, 101, 119, 125, 129, 131, 135, 136, 137, 138, 141, 145, 146, 148, 150, 159, 161, 163, 167, 169, 173, 176, 179, 181, 183, 185, 188, and 203 comprise a co-evolving network. FIG. 41 is a more enlarged detail view of a smaller portion of the matrix shown in FIG. 39, and reveals that a separate network of positions 25, 74, 82, 84, 85, 199 and 226 are co-evolving with each other, but not with the larger cluster.

[0193] FIG. 42 depicts these two sets of positions mapped on a 3D structure of the 1 GFL and shows that the large network (blue) forms a largely contiguous set of residues that extends from both ends of the beta-barrel and interacts with the GFP chromophore (green sticks). The second, smaller network forms another set of packed residues at one end of the barrel (orange).

[0194] Consistency with know GFP mutations: sites identified in the two networks correlate with known mutations in fluorescent proteins such as GFP and RFP:

[0195] Jain and Ranganathan, PNAS 2004, 101(1) pp. 111-116. Positions around the chromophore found to have large energetic effects were 94, 96, 183, 203, 145, (which are part of the SCA network) and 69 and 222 (strongly coupled to network residues).

[0196] T203 is known to affect the absorbance spectrum, by stabilizing the protonated state and is mutated to Tyrosine in the yellow variant, YFP, and to Histidine in the photoactivatable variant developed by Jennifer Lippincott-Schwartz's lab. Patterson and Lippincott-Schwartz, Science 2002, 297 pp. 1873-1877.

[0197] Shaner, et al. Nature Biotechnology 2004, 22(12) pp. 1567-1572. Color tuning in RFP—we predict several sites that contribute significantly to the tuning in RFP mutants Orange, Banana and Honeydew (positions 84, 146, 148, 167, 179, 181, 203).

[0198] Campbell, et al. PNAS 2002, 99(12) pp. 7877-7882. Correlation with mutations in mRFP (a monomeric RFP variant): 42, 125, 167, 179, 181, 183, 203.

[0199] Wang, et al. PNAS 2004, 101(48) pp. 16745-16749. Correlation with a mutation in mRFP found to narrow the width of the emission spectrum (125).

[0200] In the Shaner, Campbell and Wang papers, the mutations that we identify were found by random mutagenesis. This suggests that our mutagenesis, targeting these sites, would be able to quickly access several of the same functional properties as found in the published studies. Furthermore, it shows that the residues identified by SCA have important functional impact, and suggests that the network positions that have not yet been studied will play a strong role in the tuning the function of these proteins. We expect that mutagenesis of SCA network residues in GFP will extend the spectral properties of existing natural fluorescent proteins.

[0201] Statistical Coupling Analysis in Proven Drug Targets

[0202] One embodiment of SCA was tested to determine whether it could be used to identify allosteric sites in proteins that may be suitable for targeted drug design. Two protein families were analyzed-caspases and glycogen phosphorylase—for which drugs have been identified that regulate activity by binding to known allosteric sites (away from the active site).

[0203] The Caspase family: Caspases are a family of dimeric cysteine proteases involved in programmed cell death (apoptosis) and inflammation. The version of SCA described above was performed on an alignment of 190 members of the caspase family, using the following commands:

[DEmat,DEvec]=dg(at);
perturbation_matrix=stat_fluc(at);
[cma,cmr]=global_sca(perturbation_matrix);

[0204] The conservation pattern for the caspase family shows several sites with very low conservation (FIG. 12), consistent with appropriate sequence diversity and alignment size. FIG. 13A shows the cmr matrix for the caspase family. FIG. 13B shows the results of performing the hierarchial clustering technique described above on the cmr matrix, and shows two dominant clusters. Mapped on the caspase structure (FIGS. 14A-F), the clusters show (as in other protein families) a contiguous network of interactions that links the active site to other functional surfaces (e.g., the dimer interface) through the core of the protein. Most of the network is buried in the core of the protein with only two solvent exposed surfaces comprising residues at the active site and residues at the dimer interface (FIG. 14B and FIG. 14D, respectively). Hardy et al. (2004) have discovered a ligand (DICA) that allosterically regulates proteolytic activity, which remarkably binds directly at the location in the dimer interface predicted by SCA to be coupled to the active site.

[0205] FIGS. 14A-14F show a crystal structure of human caspase-7 in complex with DICA and illustrate the stereochemistry of DICA recognition and correlation with the SCA predictions. This supports using SCA as a tool to discover potential allosteric sites for targeting drug design and discovery.

[0206] The Glycogen Phosphorylase family: Glycogen phosphorylase (glyp) is a critical enzyme in gluconeogenesis, converting glycogen into glucose-1-phosphate. glyp is allosterically regulated by a number of small molecules, including caffeine and AMP, as well as a class of indole-2-carboxamide inhibitors (CP-403,700) discovered by Rath et al. (2000) Applying SCA to this family demonstrates interaction of the network with all of these allosteric regulators.

[0207] One embodiment of SCA was conducted on an alignment of 152 glyp family members that showed good sequence diversity. The alignment was truncated to the sequence of human liver glycogen phosphorylase B for structural mapping, and the analysis was performed as described above, using the following commands:

[DEmat,DEvec]=dg(alignment);
perturbation_matrix = stat_fluc(alignment);
[cma,cmr]=global_sca(perturbation_matrix);

[0208] FIG. 15 shows the resulting conservation pattern. FIGS. 16A and 16B show the cmr matrix for the glyp family, both unclustered (FIG. 16A) and clustered (FIG. 16B). Clustering reveals two dominant clusters with similar patterns of coupling. Combining these two clusters and mapping on the structure of human glyp gives the results shown in FIGS. 17A-F. As in the caspases, the network is nearly fully buried, with solvent exposure limited to the active site and each surface site that directly contacts each of the allosteric ligands of glyp. The highly-limited solvent exposure of the SCA-identified sites (and yet the clear functional relevance of these mapping) highlights the value of SCA in focusing drug design and discovery processes around functionally-relevant surface sites.

[0209] It should be understood that although the version of SCA described above in detail is one suitable way to perform SCA on a family of biological sequences, it is clear from this disclosure that other ways exist that involve analyzing the coupling of fewer than all pairs of possible alignment positions, such as a version of SCA that analyzes the conserved co-variation between only one pair of biological position elements at one pair of biological sequence positions.

[0210] Designing Artificial Members of a Family of Biological Sequences

[0211] Some embodiments of the present methods include, in one respect, designing artificial biological sequences using the statistical conservation values, such as the ΔE_{i,x}^{stat} values that are calculated for the biological position elements of interest. One way of using those values is to use a dataset that is derived—at least in part—from them, such as one of the statistical coupling matrices described above. In this regard, the SCM that is used may, for example, comprise C^{ev} values calculated for all pairs of biological position elements at different positions in a given target alignment (whether, for example, in a cma matrix as C_{i,x,j,y}^{ev} values or in a cmr matrix as C_{i,j}^{ev} values), or C^{ev} values that are calculated based on as few as one pair of biological position elements at different positions.

[0212] The following description is one example of how to carry out designing artificial biological sequences using statistical conservation values:

[0213] First, the alignment, which may be characterized as a target alignment and has M biological sequences that are functionally organized in M rows and N columns, may be altered to yield an altered alignment that retains M biological sequences in M rows and N columns. The alteration may comprise introducing sequence diversity into the target alignment by shuffling (e.g., randomly) at least two biological position elements within one or more positions (columns) of the target alignment. Throughout this disclosure, alignment positions and sequence positions of alignments mean the same thing. When done randomly, the shuffling process may be characterized as randomizing an alignment. The alteration process may be characterized as diversifying an alignment.

[0214] When carried out for each alignment position independently, such shuffling results in an altered (e.g., randomized) alignment having the same size as the target (or starting) alignment. The altered alignment has the same sequence position conservation pattern (because no changes are made to the position-specific frequencies of biological position elements). If sufficiently shuffled, the statistical couplings between pairs of biological position elements at different positions will be substantially or completely destroyed. FIGS. 18A and 18B show a cmr matrix both before and after shuffling.

[0215] After altering the alignment, additional shuffling of biological position elements within each alignment column may occur, but with a target of substantially reproducing the SCM of the target alignment. One way to achieve this target is to use an optimization algorithm, such as a simulated annealing algorithm, one type of which is a Metropolis-Monte Carlo algorithm. Such an algorithm follows an iterative process, one example of which may be carried using the program SCA-MC.c (implemented in C++ and included as the file SCAMC.txt in the computer program listing appendix submitted on CD with this application). The SCA-MC.c program performs the following algorithm:

[0216] a) randomizing the alignment to yield a randomized alignment that retains M biological sequences in M rows and N columns, the randomizing comprising randomly selecting at least two rows and one column of the target alignment and swapping the two biological position elements present at the two selected positions of the target alignment to yield the randomized alignment, which may be characterized as alignment₀ (the 0^{th} iteration alignment);

[0217] b) obtaining (e.g., calculating) an SCM₀ for alignment₀, where the SCM₀ comprises a cmr matrix;

[0218] c) swapping two biological position elements within one column of the alignment₀ to yield an alignmentₙ, where each swapping comprises an iteration, and n comprises the number of iterations;

[0219] d) obtaining an SCMₙ for the alignments, where the SCMₙ comprises a cmr matrix;

[0220] e) evaluating a parameter called the system energy at the n^{th} iteration (eₙ), where the evaluating comprises obtaining (e.g., calculating) a system energy value eₙ, where eₙ=|SCMₙ−SCM_{target}|, eₙ is a scalar value that quantitatively represents how different the alignment at the n^{th} iteration is from the target alignment, and SCM_{target} is a cmr matrix calculated for the target matrix;

[0221] f) calculating the difference in system energy Δe (also characterizable as a scalar system energy value) between the n^{th} iteration and the n^{th} iteration, where Δe=eₙ−eₙ₋₁; and

[0222] g) determining whether to accept a swap from c) for a given iteration, where the determining is based on the following criteria:
[0223] i) if Δe≦0, accepting the swap (because the alignment at iteration n draws closer in terms of system energy to the target alignment than the n−1^{th} iteration); and
[0224] ii) if Δe>0, accepting the swap with a Boltzmann-weight probability

$$( {P}_{accept} = {ⅇ}^{- \frac{Δ e}{β}} )$$

(which is one form of a non-zero probability), where β is a statistical equivalent to temperature in a physical system and controls the likelihood of accepting swaps that diverge the simulation from the SCM_{target}. The parameter β is initially set high enough to keep the alignment as distant from the SCM_{target} as the SCM₀, and then exponentially reduced until convergence is substantially reached (see f) above).

[0225] The parameter β is reduced during iterations in e) when a preset number of swaps is accepted such that β_{new}=0.9β_{old}. The preset number of swaps in the SCA-MC code is 10-fold coverage of the alignment. For a M×N alignment, this means 5×M×N swaps. The simulation completes, in this embodiment, when a preset number of swaps is not accepted upon three sequential attempts at 100-fold coverage of the alignment. For a M×N alignment, this means 50×M×N swaps.

[0226] In the beginning of the simulation represented in the embodiment coded in SCA-MC, β is high, allowing many “unfavorable” swaps that increase the system energy to a maximal level. As β is lowered, the selection for swaps becomes increasingly stringent, causing the n^{th} SCM to become increasingly similar to the target SCM.

[0227] For the WW domain family, the energy trajectory for one run of this coded simulation is graphed in FIG. 19, and the cmr matrices corresponding to several points along the trajectory are shown in FIG. 20. As the energy converges on a minimum value, the sequences become more similar to natural WW domains; as a result, the maximum (or top-hit) pairwise identity between the artificial sequences and natural WW domains increases to a maximum value. The “top-hit” identity of an artificial sequence can be assessed as follows. Assume the natural alignment has 10 protein sequences. Compare an artificial sequence to each of the 10 natural sequences. Any position that has the same amino acid in the artificial sequence as in a given natural sequence counts as an “identity.” The percentage identity is the number of identities divided by the number of positions in the sequence/alignment. Comparing the artificial sequence to the 10 natural sequences gives 10 values for the percentage identity. The highest value among these is the “top-hit identity” for that artificial sequence. It reveals how similar the artificial sequence is to any natural sequence in the alignment. For instance, if the artificial sequence is identical to one of the natural sequences, then the top-hit identity would be 1 (or 100%).

[0228] In the file SCA-MC.c that appears below, references to “DG” and “DDG” variables are to be read as “DE” and “DDE”, which are used throughout the code provided elsewhere in this description. The stdio.h, math.h and tim.h files referenced in SCA-MC.c are part of the Standard C library, and need not be recited.

[0229] The alloc_swl.h, align.h and gamma.h files that are used with the SCA-MC.c file provided below each appear at the end of the description but before the claims under the general heading “COMPUTER PROGRAM LISTINGS.”

[0230] Designing Artificial Members of a Family of Biological Sequences Using a Subset of the SCM

[0231] An alternative technique to the one described above for designing artificial biological sequences using statistical conservation values involves, broadly, eliminating information from the chosen SCM during application of the optimization algorithm (such as the Metropolis-Monte Carlo simulated annealing algorithm described above), such that the optimization algorithm runs on a subset of the chosen, or target, SCM. It has been discovered that complete convergence of the Metropolis-Monte Carlo trajectory (as performed using SCA-MC.c) on a full SCM yields a set of artificial sequences with high identities to the initial set of natural sequences. One approach to designing artificial sequences with lower identities is to eliminate data (such as data that is evolutionarily unimportant) from the SCM while still retaining the information useful to designing folded, functional artificial sequences. The data elimination may be logical rather than actual in that it may involve adapting the algorithm to operate only on a subset of the SCM (e.g., by masking off the “eliminated” data).

[0232] The manner in which artificial sequences may be designed using this “mask” approach can be accomplished using the relevant computer programs provided in this disclosure in the manner described above and by performing the optimization algorithm contained in SCA-MC-2-mask-AP.c (implemented in C++ and included as the file SCAMCMASK.txt in the computer program listing appendix submitted on CD with this application). This approach is the same as the approach described above in Designing Artificial Members of a Family of Biological Sequences except that (1) the step of evaluating the system energy is performed on a subset of the SCM_{target} and therefore also on a subset of the SCMₙ; (2) the preset number of swaps is equal to M (the number of sequences in the alignment)×(M−1)×N (the number of positions in the alignment); (3) the test for equilibration is based on different criteria; and 4) a finer temperature step size is used—the temperature decreases by 0.95 each round instead of by 0.9. The input file stdlib.h referenced in SCA-MC-2-mask-AP.c is it part of the Standard C library and need not be recited.

[0233] There are many different ways to eliminate information from the target SCM in order to allow for determination (e.g., calculation) of the system energy on a subset of that SCM. For example, any of the following techniques may be employed:

[0234] 1) backing up along the energy trajectory. As the Monte Carlo algorithm converges, the energy drops and the sequence identity rises. If alignments from points along the convergence trajectory are taken, sequences with relatively low energy (the matrix is mostly converged) but with relatively low identity (the sequences are still different) can be found.

[0235] 2) significance mask (or “sigma mask”). One way to disregard some elements of the SCM that may be insignificant is to create a significance cutoff, or a significance criteria. For example, any C^{ev} coupling values that are less than two standard deviations below the mean could be left out of the calculation. The remaining entries that have high C^{ev} values may contribute almost all of the information necessary to recreate the matrix, but give rise to lower sequence identities.

[0236] 3) stripe mask. Another approach involves identifying the dominant co-evolving network(s) using, e.g., clustering or ICA, and using only the C^{ev} values involving these residues. Taking this approach defines a “stripe” of coupling across the SCM that contributes to the energy calculation. Other entries in the SCM are disregarded by the Monte Carlo algorithm. As with the significance mask, the result is that most of the energy is recreated by the Monte Carlo algorithm, but the resulting sequences have a lower identity relative to the natural sequences of the original alignment.

[0237] The sigma mask described above was performed using the SCA-MC-2-mask-AP.c code on three different protein families: SH3 domains, Dihydrofolate Reductase, and SH2 domains.

[0238] In FIG. 28, which concerns the SH3 domain, line 10 is the mean top-hit identity between artificial SH3 sequences created using the version of the optimization algorithm described above that did not involve the use of a mask (which includes SCA-MC.c) and the sequences of the natural SH3 alignment. Line 20 represents +1 standard deviation from mean 10, and line 30 represents −1 standard deviation from mean 10. The points designated by element number 80 (only one of the six points is labeled, but the label applies to each) represent the top hit identity between artificial SH3 sequences created using the SCA-MC-2-mask-AP.c code where sigma cutoff masks of 1, 2, 3, 5, 10 and 30 standard deviations above the mean conserved co-evolution score (C^{ev}) of the entire SCM were used (which scores were calculated using the techniques described above), and the sequences of the natural SH3 alignment. The errorbars identified by element number 90 (again, the label applies to each bounded vertical bar) span+/−1 standard deviation from the mean top-hit identity produced by each sigma cutoff mask run. Line 50 represents the mean top-hit identity between the sequences in the randomized alignment (in which the biological position elements of the natural alignment were shuffled to maintain the conservation pattern but destroy the coupling between sites), which can be created using either the SCA-MC.c program or the SCA-MC-2-mask-AP.c program, and the sequences of the natural SH3 alignment. Line 60 represents +1 standard deviation from mean 50, and line 70 represents −1 standard deviation from mean 50.

[0239] FIG. 29A is a cmr matrix of the natural SH3 alignment. FIG. 29B is a cmr matrix of the randomized alignment, which was created using the version of the optimization algorithm described above that lacks a mask and includes SCA-MC.c, but which can also be created using a version of the algorithm that includes a mask (such as the version that includes SCA-MC-2-mask-AP.c). FIG. 29C is a cmr matrix of artificial SH3 sequences created using the version of the optimization algorithm described above that lacks a mask and includes SCA-MC.c, but which could have been created using a version that includes a mask. FIGS. 29D-I are each a cmr matrix of the artificial SH3 sequences created using the version of SCA described above that includes a mask (which includes SCA-MC-2-mask-AP.c), where the mask was set such that the significance cutoff was chosen as one of the standard deviations above the mean conserved co-evolution score (C^{ev}) of the entire SCM (those standard deviations are 1, 2, 3, 5, 10 and 30).

[0240] FIGS. 30A-I are included to illustrate the effectiveness of the masking techniques employed. FIG. 30A shows the cmr matrix of the natural SH3 alignment again. FIG. 30B is a difference matrix that was calculated between the cmr matrix of FIG. 30A and the cmr matrix shown in FIG. 29B. FIGS. 30C-I are difference matrices, respectively, between the cmr matrix shown in FIG. 30A and those shown in FIGS. 29C-I. Each difference matrix is the absolute value of the difference between the cmr matrix of the natural SH3 alignment and the respective sigma cutoff matrix.

[0241] FIG. 31 shows comparable values to those in FIG. 28 that were determined using an alignment of natural Dihydrofolate Reductase sequences. The points (which blend together) labeled with element number 100 (only one of the six groups of points is labeled, but the label applies to each) represent the individual top-hit identity values between each artificial sequence and those of the natural alignment.

[0242] FIG. 32A is a cmr matrix of the natural Dihydrofolate Reductase alignment. FIG. 32B is a cmr matrix of the randomized alignment, which was created using the version of the optimization algorithm described above that lacks a mask and includes SCA-MC.c, but which can also be created using a version the algorithm that includes a mask (such as the version that includes SCA-MC-2-mask-AP.c). FIGS. 32C-H are each a cmr matrix of the artificial Dihydrofolate Reductase sequences created using the version of SCA described above that includes a mask (which includes SCA-MC-2-mask-AP.c), where the mask was set such that the significance cutoff was chosen as one of the standard deviations above the mean conserved co-evolution score (C^{ev}) of the entire SCM (those standard deviations are 1, 2, 3, 5, 10 and 30).

[0243] FIGS. 33A-H are included to illustrate the effectiveness of the masking techniques employed. FIG. 33A shows the cmr matrix of the natural Dihydrofolate Reductase alignment again. FIG. 33B is a difference matrix that was calculated between the cmr matrix of FIG. 33A and the cmr matrix shown in FIG. 32B. FIGS. 33C-H are difference matrices, respectively, between the cmr matrix shown in FIG. 33A and those shown in FIGS. 32C-H.

[0244] FIG. 34 shows comparable values to those in FIGS. 28 and 31 that were determined using an alignment of natural SH2 sequences.

[0245] FIG. 35A is a cmr matrix of the natural SH2 alignment. FIGS. 35B-G are each a cmr matrix of the artificial SH2 sequences created using the version of the optimization algorithm described above that includes a mask (which includes SCA-MC-2-mask-AP.c), where the mask was set such that the significance cutoff was chosen as one of the standard deviations above the mean conserved co-evolution score (C^{ev}) of the entire SCM (those standard deviations are 1, 2, 3, 5, 10 and 30).

[0246] FIGS. 36A-G are included to illustrate the effectiveness of the masking techniques employed. FIG. 36A shows the cmr matrix of the natural SH2 alignment again. FIGS. 36B-G are difference matrices, respectively, between the cmr matrix shown in FIG. 36A and those shown in FIGS. 35B-G.

[0247] Gene Construction and Protein Expression

[0248] To test the ability of the artificial WW sequences to fold and function like their natural counterparts, genes corresponding to the protein sequences selected from each of the six points along the Monte Carlo trajectory indicated by the red lines in FIG. 19 were constructed, and the expressed proteins were studied. As a positive control, a library of natural WW domains was built because the efficiency of these proteins folding in the experimental laboratory conditions was unknown.

[0249] Genes corresponding to the artificial protein sequences were constructed by back-translation (using E. coli codon optimization) built by the polymerase chain reaction (PCR) using overlapping 45-mer oligonucleotide sequences (oligos) that cover each gene. The overlap was adjusted to have a melting temperature (Tm) of ˜60° C. The PCR products were digested at NcoI and XhoI sites encoded on the terminal primers and subcloned into the pHIS8-3 expression vector. Constructs were verified by DNA sequencing.

[0250] Proteins were expressed in JM109(DE3) cells grown at 37° C. in Terrific Broth (TB) to an OD600 of ˜1.2, and induced with 0.5 mM IPTG at 18° C. overnight. For fluorescence experiments, 50 ml cultures were lysed in 3 ml binding buffer (BB, 25 mM Tris HCl, pH 8.0, 0.5 M NaCl, 5 mM imidazole) by sonication followed by centrifugation and incubation of the cleared lysate with 75 μl bed volume Ni⁺-NTA (Qiagen) for 30 minutes at 4° C. After washing (3× with 15 ml BB), WW proteins were eluted in elution buffer (EB, 100 mM Tris HCl, pH 8.0, 1 M Na Cl, 400 mM imidazole). Cultures were scaled up for NMR experiments, using 1-2 L of TB and 0.5 ml of affinity resin.

[0251] To assess the ability of these artificial proteins to fold into a stable, WW-like structure, thermal denaturation assays were conducted. A hallmark of natively-folded small proteins is cooperative and reversible transition between folded and unfolded states. In the WW domain, this folding equilibrium and the consistency of the two-state approximation have been well-described (Jager et al., 2001; Koepf et al., 1999). Here, the folding reaction was followed by monitoring the fluorescence of a buried tryptophan (Trp7), which becomes quenched due to solvent exposure upon thermal denaturation and therefore reports the fraction of protein folded as a function of temperature.

[0252] Experimental Tests of Folding

[0253] First, 42 natural WW domains were tested in order to determine the frequency of observing folded proteins using this assay. Natural WW domains show a range of thermal denaturation profiles (FIG. 21A). Some such as N1 are clearly well-folded, showing a cooperative denaturation with thermodynamic parameters typical for WW domains (ΔHᵤ^{VH}=22.5 kcal/mol, Tₘ=46.8° C.). Others such as N22 cooperatively denature but are less stable (ΔHᵤ^{VH}=18.5 kcal/mol, Tₘ=25.2° C.). Still others such as N36, despite good solubility, show no convincing evidence of a native state given the experimental conditions of the assay. Twenty-eight of 42 natural WW proteins (67%) were determined to be folded using this assay. As a negative control, a set of sequences was tested from an alignment that strictly preserved the conservation pattern of the, but that contained no coupling information between positions (site Independent Coupling, or IC). In essence, these are the sequences resulting from initial randomization of the natural alignment (described above in the section entitled Designing Artificial Members of a Family of Biological Sequences) but prior to Monte Carlo annealing. Of these 43 IC sequences, none were folded using this assay (FIG. 21B).

[0254] Twenty sequences were selected from each of the six points along the Monte Carlo convergence trajectory (those in FIG. 20 depict cmr matrices of the artificial alignments selected) and tested for folding. FIG. 21C shows examples of the data for these sequences from the 60% identity set. Just as the case of wild-type WW domains, artificial sequences drawn from this stage in the convergence were found to comprise a range of fold stabilities. Importantly, the stability of the folded artificial domains are similar to natural domains (compare FIG. 21A and FIG. 21C). Examples from all of the six sets are shown in FIGS. 22A-F, demonstrating that domains from all groups include sequences that display natural-like folding. Table 1 below summarizes the results for all sets of domains.

TABLE 1
Solubility and folding of natural and artificial WW sequences.

| | average | | | |
|---|---|---|---|---|
| | maximal | | # tested | |
| | identity (%) | energy (eₙ) | (% soluble) | # folded (%) |
| Natural | 100 | 0 | 42 (84%) | 28 (67%) |
| IC | 51 | 23076 | 43 (70%) | 0 (0%) |
| CC52 | 52 | 18114 | 19 (58%) | 4 (21%) |
| CC55 | 55 | 12602 | 20 (50%) | 6 (30%) |
| CC60 | 60 | 8171 | 20 (50%) | 6 (30%) |
| CC70 | 70 | 4528 | 20 (45%) | 6 (30%) |
| CC80 | 80 | 2721 | 20 (75%) | 11 (55%) |
| converged | 84 | 2116 | 20 (75%) | 14 (70%) |

[0255] The observed distribution of thermodynamic parameters extracted from these measurements (melting temperature (Tₘ) and the van't Hoff enthalpy of unfolding (ΔH^{VH})) indicate that the designed sequences are quantitatively similar in fold stability to natural domains (see FIG. 23). In fact, even for the CC52 and CC55 sequence sets that show low average maximal identities to natural sequences, it appears that the folded subset have thermodynamic parameters that fall well within the range of natural WW domains. From these results, it was concluded that the information in the SCM is both necessary and sufficient to define the fold of the WW domain. The data show that substantial sequence divergence can be tolerated by the WW fold if the rules of statistical coupling are imposed. This result opens up the possibility of rationally generating enormous libraries of thermally stable proteins that are variants of natural proteins.

[0256] Function from Artificial Proteins

[0257] Protein sequences evolve through random mutagenesis with selection for optimal fitness. Cooperative folding into a stable tertiary structure is one aspect of fitness, but evolutionary selection ultimately operates on function, not on structure. If indeed an SCM, such as a cma matrix or a cmr matrix, is capturing all of the sequence information for specifying natural-like proteins, then our designed artificial sequences should also function in a manner indistinguishable from that of natural WW domains.

[0258] WW domains are small protein interaction modules that adopt a curved three-stranded β-sheet structure with a binding site for proline-containing peptides formed on the concave surface of the sheet (see FIG. 24). The binding surface includes an X-Pro binding site (positions 19 and 30, in blue CPK), which recognizes the canonical proline in target peptides, and a specificity site formed by residues in β2 and the β2-β3 loop (positions 21, 23, and 26, in yellow CPK) (Zarrinpar and Lim, 2000). WW domains are classified into four groups based on target peptide sequence motifs: group I—PPxY (Chen and Sudol, 1995), group II—PPLP Ermckova et al., 1997), group III—PPR (Bedford et al., 2000), and group IV—pS/pT-P (Lu et al., 1999), where x stands for any amino acid.

[0259] It was considered whether the amino acid composition at sites plus the information in the SCM comprises sufficient the sequence information to specify the WW domain. The results above provide the first phase of this experimental test by showing that artificial sequences designed using only these parameters adopt a stable WW-like tertiary structure. However, a key further test is the sufficiency of this information for specifying function. If the SCM captures the fitness constraints on the WW family, then the artificial sequences should show class-specific recognition of proline-containing sequences and binding affinities like those of natural WW domains.

[0260] An oriented peptide library binding assay was developed for measuring WW domain specificity, and a set of natural and artificial sequences was studied. Four biotinylated degenerate peptide libraries were constructed, each oriented around one group-specific WW recognition motif, and binding was detected using an ELISA assay (see FIGS. 25A and 25B). For example, the group I oriented peptide library was biotin-Z-GMAxxxPPxYxxxAKKK (SEQ ID NO:163), where Z is 6-aminohexanoic acid and x stands for any amino acid except cysteine (theoretical degeneracy of 8.9×10⁸ sequences). A fifth proline-oriented library was also made as a control for non-specific binding. Natural WW domains that folded in the work described above were subjected to this assay. For a group I domain (Nedd4.3) the peptide library assay confirms specific interaction with the PPxY-containing sequences (Kanelis et al., 2001) (FIG. 25B). Similarly, the assay confirms known group III (FE65) and IV (Pin1) domains. HGP1 is a domain of previously unknown specificity, but clearly shows a preference for the PPLP peptide library, indicating that it has group II specificity.

[0261] Analysis of artificial domains from the CC55 set indicates that these domains also bind with specificity (FIGS. 25C-D). CC55-14 (SEQ ID NO:34) binds preferably to the PPXY library, and is classified as a group I domain. Several other domains exhibit the group III binding profile, such as CC55-15 (SEQ ID NO:35). These data demonstrate that WW domains designed using the SCA information in fact function with natural-like ligand binding specificity. The finding that SCA-designed sequences show native-like fold stability and functional specificity suggests that a SCA-based design should enable the creation of large libraries of functional sequences suitable for in-vitro or in-vivo selection.

[0262] In sections I and II below, methods are presented for modifying, expressing and purifying artificial biological sequences that can be created using embodiments of the present methods.

[0263] Nucleic Acid Vectors and Expression Systems

[0264] A variety of nucleic acid vector systems may be used to encode and express artificial polypeptides according to the invention. The term “vector” is used to refer to a carrier nucleic acid molecule into which a nucleic acid sequence can be inserted for introduction into a cell where it can be replicated. The term “expression vector” refers to any type of genetic construct comprising a nucleic acid coding for a RNA capable of being transcribed. In some cases, RNA molecules are then translated into a protein, polypeptide, or peptide such as artificial polypeptide sequences described herein.

[0265] Expression vectors can contain a variety of “control sequences,” which refer to nucleic acid sequences necessary for the transcription and possibly translation of an operably linked coding sequence in a particular host cell. Control sequences include but are not limited to transcription promoters, and enhancers, RNA splice sites, polyadenylation signal sequences, and ribosome binding sites. Some promoters and enhancers are exemplified in the Eukaryotic Promoter Data Base EPDB, (http://www.epd.isb-sib.ch/) and could be used to drive expression of desired sequences.

[0266] Vectors may also comprise selectable markers, such as drug selection marker that enable selection of cells expressing a desired nucleic acid/polypeptide sequence. For example, genes that confer resistance to ampicillin, kanamycin, chloroamphenicol, neomycin, puromycin, hygromycin, blastacidin, DHFR, GPT, zeocin and histidinol are useful selectable markers.

[0267] Some specific vectors that are contemplated herein are viral vectors that enable the highly efficient transformation of eukaryotic cells via the natural infection process of some viruses. Viral vectors are well know to those of skill in the art and some of the best characterized systems are the adenoviral, adeno-associated viral, retroviral, and vaccinia viral vector systems.

[0268] In addition to delivery of nucleic acid to cells via viral vectoring, a variety of other methods for delivery for nucleic acids into cells are well known in those in the art. Some examples include but are not limited to, electroporation of cells, chemical transfection (e.g., with calcium phosphate or DEAE-dextran), liposomal delivery or microprojectile bombardment.

[0269] Polypeptide Expression and Purification

[0270] It will be understood to by one of skill in the art that artificial polypeptides according to the invention may be chemically synthesized or expressed in cells and purified. Generally, “purified” will refer to an artificial protein that has been subjected to fractionation or isolation to remove various other protein or peptide components. To purify recombinantly expressed artificial polypeptides, cell lysates from expressing cells will be subjected to fractionation to remove various other components from the composition. Various techniques suitable for use in protein purification will be well known to those of skill in the art. In some cases artificial polypeptides may be fused with additional amino acid sequence such sequences may, for example, facilitate polypeptide purification. Some possible fusion proteins that could be generated include histadine tags (as specifically exemplified herein), Glutathione S-transferase (GST), Maltose binding protein (MBP), Flag and myc tagged artificial polypeptides. These additional sequences may be used to aid in purification of the recombinant protein, and in some cases may then be removed by protease cleavage.

[0271] The claims are not to be interpreted as including means-plus- or step-plus-function limitations, unless such a limitation is explicitly recited in a given claim using the phrase(s) “means for” or “step for,” respectively.

### REFERENCES

[0272] The following references, to the extent that they provide procedural or other details supplementary to those set forth in this disclosure, are specifically incorporated by reference.
[0273] Altschul et al. Nucleic Acids Res., 25:3389-402, 1997.
[0274] Anfinsen, Science, 181:223-30, 1973.
[0275] Bedford et al., J. Biol. Chem., 275:10359-10369, 2000.
[0276] Brown, Nucleic Acids Res., 27(1):314, 1999.
[0277] Carter et al., Cell, 38:835-840, 1984.
[0278] Chen and Stites, Biochemistry, 40:14012-9, 2001.
[0279] Chen and Sudol, Proc. Natl. Acad. Sci. USA, 92:7819-7823, 1995.
[0280] Chen et al., J. Biol. Chem., 272:17070-17077, 1997.
[0281] Daggett and Fersht, Nat. Rev. Mol. Cell. Biol., 4:497-502, 2003.
[0282] Dinner et al., Trends Biochem. Sci., 25:331-9, 2000.
[0283] Dobson, Nature, 426:884-90, 2003.
[0284] Ermekova et al., J. Biol. Chem., 272:32869-32877, 1997.
[0285] Espanel and Sudol, J. Biol. Chem., 274:17284-17289, 1999.
[0286] Fersht and Daggett, Cell, 108:573-82, 2002.
[0287] Garrard et al., Embo. J, 22:1125-1133, 2003.
[0288] Gerstein and Chothia, Proc. Natl. Acad. Sci. U.S.A., 93:10167-72, 1996.
[0289] Hardy et al., Proc. Natl. Acad. Sci. USA, 101:12461-12466, 2004.
[0290] Hidalgo and MacKinnon, Science, 268:307-10, 1995.
[0291] Hidalgo and MacKinnon, Science, 268:307-310, 1995.
[0292] Horovitz and Fersht, J. Mol. Biol., 224:733-40, 1992.
[0293] Huang et al., Nat. Struct. Biol., 7:634-638, 2000.
[0294] Hubbard et al., Nucleic Acids Res., 27(1):254-256, 1999.
[0295] Jager et al., J. Mol. Biol., 311:373-393, 2001.
[0296] Kanelis et al., Nat. Struct. Biol., 8:407-412, 2001.
[0297] Kasanov et al., Chem. Biol., 8:231-241, 2001.
[0298] Klingler and Brutlag, Protein Sci., 3:1847-57, 1994.
[0299] Koepf et al., Protein Sci., 8:841-853, 1999.
[0300] LiCata and Ackers, Biochemistry, 34:3133-9, 1995.
[0301] Lockless and Ranganathan, Science, 286:295-299, 1999.
[0302] Lowe and Eddy, Nucleic Acids Res., 25(5):955-964, 1997.
[0303] Lu et al., Science, 283:1325-1328, 1999.
[0304] Luque et al., Annu. Rev. Biophys. Biomol. Struct., 31:235-56, 2002.
[0305] Marqusee and Sauer, Protein Sci., 3:2217-25, 1994.
[0306] Pei et al., Bioinformatics. 19(3):427-8, 2003.
[0307] Peterson et al., Mol. Cell, 13:665-676, 2004.
[0308] Rath et al., Chem. Biol., 7:677-682, 2000.
[0309] Richards and Lim, Q. Rev. Biophys., 26:423-98, 1993.
[0310] Skelton et al., J. Biol. Chem., 278:7645-7654, 2003.
[0311] Suel et al., Nat. Struct. Biol., 10:59-69, 2003.
[0312] Thompson et al., Nucl. Acids Res., 22:4673-80, 1994.
[0313] Toepert et al., Angew Chem. Int. Ed. Engl., 40:897-900, 2001.
[0314] Zarrinpar and Lim, Nat. Struct. Biol., 7:611-613, 2000.
[0315] Zwieb, Nucl. Acids Res., 1997, 25(1):102-103, 1997.

### Computer Program Listings

[0316] The following computer program listings are organized by file name, which is centered above the listing to which it applies:

### random_elim_dg.m

function [data_out]=random_elim_dg(A)

% initial matters

[nseqs,y]=size(A);

nreps=100;

f_elim=0.03;

site_parent=zeros(y,20);

site_new=zeros(y,20);

% calculation of conservation at sites, sorting of the conservation

% values low to high, and choosing the five sites with lowest conservation

% values but that have at least 85% representation in the alignment.

The application's sequence listing, which the Patent Office published only in electronic form, follows.

SEQUENCE LISTING (3093 sequences)

SEQ ID NO: 1 - protein, 36 aa, Artificial Sequence
  Description of Artificial Sequence:  Synthetic Peptide
ELDPVTWEKALDRQGVPYYVNKETDRAHWSDPEEPK

SEQ ID NO: 2 - protein, 35 aa, Artificial Sequence
  Description of Artificial Sequence:  Synthetic Peptide
TPVPYGWEARLDPTGWYFYNHITNTSQWRDPRMRS

SEQ ID NO: 3 - protein, 36 aa, Artificial Sequence
  Description of Artificial Sequence:  Synthetic Peptide
LPQPACWTAGTSADGMCYYYNRKTGSSSWENPQEGE

SEQ ID NO: 4 - protein, 36 aa, Artificial Sequence
  Description of Artificial Sequence:  Synthetic Peptide
EELPPGWEACQDPDGVTQFVNPEIGRTQFQDPPAIR

SEQ ID NO: 5 - protein, 36 aa, Artificial Sequence
  Description of Artificial Sequence:  Synthetic Peptide
GELSEGWKKHVSEDGRLYYFNKNTKESTWEKPLVPW

SEQ ID NO: 6 - protein, 37 aa, Artificial Sequence
  Description of Artificial Sequence:  Synthetic Peptide
EPLPMGWEGRYTDGSGRVFFFDHNTRTTMWQDPTEPK

SEQ ID NO: 7 - protein, 36 aa, Artificial Sequence
  Description of Artificial Sequence:  Synthetic Peptide
PAARDTWRKHKDQTNKTYYVNTITKQSAWKRPPSQS

SEQ ID NO: 8 - protein, 36 aa, Artificial Sequence
  Description of Artificial Sequence:  Synthetic Peptide
HDLPKGWEEGRTPDGRPFYFDHNTRTTQWHDPRTGG

SEQ ID NO: 9 - protein, 37 aa, Artificial Sequence
  Description of Artificial Sequence:  Synthetic Peptide
PKNAAEWIGRWSAVSGKVYYYNSQTKASTWEIPDLAA

SEQ ID NO: 10 - protein, 37 aa, Artificial Sequence
  Description of Artificial Sequence:  Synthetic Peptide
GPDPSDWSVCTDSKDGRVYYINPNTGRSQWERPNEQG

SEQ ID NO: 11 - protein, 37 aa, Artificial Sequence
  Description of Artificial Sequence:  Synthetic Peptide
EPVAEGWEERTDEIDGVVFFYNTRTGETKWTKPKEAD

SEQ ID NO: 12 - protein, 36 aa, Artificial Sequence
  Description of Artificial Sequence:  Synthetic Peptide
GPLPKAWEVRYTRKGRRFFVDHNTRTTTWSDPSDEI

SEQ ID NO: 13 - protein, 37 aa, Artificial Sequence
  Description of Artificial Sequence:  Synthetic Peptide
APLPPGWEGAKDPPDRRTYFVNHNSRTTVWQDPTTEH

SEQ ID NO: 14 - protein, 36 aa, Artificial Sequence
  Description of Artificial Sequence:  Synthetic Peptide
GELPKGWKRCYDELGFTYYLNHNAKRTQWERPAMEA

SEQ ID NO: 15 - protein, 36 aa, Artificial Sequence
  Description of Artificial Sequence:  Synthetic Peptide
GPLAAHWVEHYSESGRTYYLNHKTQKSSWERPEELD

SEQ ID NO: 16 - protein, 37 aa, Artificial Sequence
  Description of Artificial Sequence:  Synthetic Peptide
PTPPPGWQEGKTRNDGQVYFIDPNTRKSTFHDPGNIM

SEQ ID NO: 17 - protein, 36 aa, Artificial Sequence
  Description of Artificial Sequence:  Synthetic Peptide
EPLPPGWKKRLTPDGRYFYYNHTTKETQWTKPEPWA

SEQ ID NO: 18 - protein, 36 aa, Artificial Sequence
  Description of Artificial Sequence:  Synthetic Peptide
EKLPYGWEKRMDATGETYYVDQNTRETTWTRPSAPL

SEQ ID NO: 19 - protein, 36 aa, Artificial Sequence
  Description of Artificial Sequence:  Synthetic Peptide
DEVHYSWRVFTDQHGRCYYIDPITGTSTWEKTARSP

SEQ ID NO: 20 - protein, 36 aa, Artificial Sequence
  Description of Artificial Sequence:  Synthetic Peptide
SVLPSTWKEVQSSTNRDYYYNSVTKISQWDPPAEEG

SEQ ID NO: 21 - protein, 36 aa, Artificial Sequence
  Description of Artificial Sequence:  Synthetic Peptide
VTAIKPWMEHYTPYNKKYYYNFMTKHSKWEKPLEAG

SEQ ID NO: 22 - protein, 36 aa, Artificial Sequence
  Description of Artificial Sequence:  Synthetic Peptide
TPYRPGWCEAVSDCGRVYYYNPLTGQSTWGKPAELG

SEQ ID NO: 23 - protein, 36 aa, Artificial Sequence
  Description of Artificial Sequence:  Synthetic Peptide
KFLPPLWKRAMDRRGMPYFFDKETGTSTWNLPAVDM

SEQ ID NO: 24 - protein, 36 aa, Artificial Sequence
  Description of Artificial Sequence:  Synthetic Peptide
NRLVPAWVVAFAPDRGRPYYYNESTKVTSWEPPLYE

SEQ ID NO: 25 - protein, 37 aa, Artificial Sequence
  Description of Artificial Sequence:  Synthetic Peptide
TLLHFSWKERKDRAKGRTYYIDHNTRVTTWEKPQGWN

SEQ ID NO: 26 - protein, 35 aa, Artificial Sequence
  Description of Artificial Sequence:  Synthetic Peptide
NPFPPNWQMTLDNSGEYFYNTATKETQWTRPAKPM

SEQ ID NO: 27 - protein, 36 aa, Artificial Sequence
  Description of Artificial Sequence:  Synthetic Peptide
TPLPQGWEKRTDGTEGPFYINHITQQTTWEDPRLMA

SEQ ID NO: 28 - protein, 36 aa, Artificial Sequence
  Description of Artificial Sequence:  Synthetic Peptide
SPLPPGWEERITPFGYTYYVDHISRTTTWQDPEADL

SEQ ID NO: 29 - protein, 36 aa, Artificial Sequence
  Description of Artificial Sequence:  Synthetic Peptide
SPLPSPWEMIFTPNSRVYFYNHETRTTTWQRPRDFK

SEQ ID NO: 30 - protein, 36 aa, Artificial Sequence
  Description of Artificial Sequence:  Synthetic Peptide
RGLKYSWKVYVSAKGTVYYYNSETKLSSWKIPSLLP

SEQ ID NO: 31 - protein, 37 aa, Artificial Sequence
  Description of Artificial Sequence:  Synthetic Peptide
EGLPGGWERGYTKEQGQIYFVDHASRSTTFNDPRTAS

SEQ ID NO: 32 - protein, 36 aa, Artificial Sequence
  Description of Artificial Sequence:  Synthetic Peptide
SVLPEGWEMIVDNTGEKFFIDHNNKATTYQDPRLLG

SEQ ID NO: 33 - protein, 37 aa, Artificial Sequence
  Description of Artificial Sequence:  Synthetic Peptide
GPLPAGWTMRKTSPENLRYFFNHEDKVSSWQHPRLLN

SEQ ID NO: 34 - protein, 36 aa, Artificial Sequence
  Description of Artificial Sequence:  Synthetic Peptide
SGLPQGWEMRKDSFGYRYFVDHNTHTTTWEDPDKCD

SEQ ID NO: 35 - protein, 36 aa, Artificial Sequence
  Description of Artificial Sequence:  Synthetic Peptide
AGLPQGWEAAFDNSGAVYYVNPNTGKTQWERPCLEN

SEQ ID NO: 36 - protein, 36 aa, Artificial Sequence
  Description of Artificial Sequence:  Synthetic Peptide
KELPSGWSAAFASSGRPYYHDKRSKTSTWQNPRIEP

SEQ ID NO: 37 - protein, 36 aa, Artificial Sequence
  Description of Artificial Sequence:  Synthetic Peptide
PEGARSWKKAEHGEHGIYYYNNITGLSKWEKPDDAT

SEQ ID NO: 38 - protein, 36 aa, Artificial Sequence
  Description of Artificial Sequence:  Synthetic Peptide
GPLPPKWEMVWTALGRKYFVNHTTKTTSWVDPLLTK

SEQ ID NO: 39 - protein, 36 aa, Artificial Sequence
  Description of Artificial Sequence:  Synthetic Peptide
SGIQSGWKEYKDPDSTTYYYHVSTRQSQWEPPEDED

SEQ ID NO: 40 - protein, 37 aa, Artificial Sequence
  Description of Artificial Sequence:  Synthetic Peptide
EENSSDWKERQSPEDKRKFYYNSATKQSSYEKPTTQN

SEQ ID NO: 41 - protein, 36 aa, Artificial Sequence
  Description of Artificial Sequence:  Synthetic Peptide
GELPEGWEARYTEQGTRYFVDHNTRTTTYSDPRLAA

SEQ ID NO: 42 - protein, 36 aa, Artificial Sequence
  Description of Artificial Sequence:  Synthetic Peptide
SELPPGWERRVDQKGRSYYVDHNTRTTTWERPRMRP

SEQ ID NO: 43 - protein, 36 aa, Artificial Sequence
  Description of Artificial Sequence:  Synthetic Peptide
PNLPKDWEKLYSHEGILYFWNPYTGVTLYEDPASEN

SEQ ID NO: 44 - protein, 36 aa, Artificial Sequence
  Description of Artificial Sequence:  Synthetic Peptide
EPLPSGWEARWDSEGRTYYVDHNNRTTQWSRPCMEL

SEQ ID NO: 45 - protein, 36 aa, Artificial Sequence
  Description of Artificial Sequence:  Synthetic Peptide
PLPYGWNQRIAKEDGDPYYFHIATGISQWEPPRVPK

SEQ ID NO: 46 - protein, 36 aa, Artificial Sequence
  Description of Artificial Sequence:  Synthetic Peptide
VANAAYWREVKSKKGRKYYYNFRTGKSQWEKPQALI

SEQ ID NO: 47 - protein, 36 aa, Artificial Sequence
  Description of Artificial Sequence:  Synthetic Peptide
LALPPGWEKTASSTGFRYFVNKMTNVRTNTPPRDWR

SEQ ID NO: 48 - protein, 36 aa, Artificial Sequence
  Description of Artificial Sequence:  Synthetic Peptide
PPLPPGWEKAYDAEGMWYYVNHTERTTQFQNPGEGA

SEQ ID NO: 49 - protein, 36 aa, Artificial Sequence
  Description of Artificial Sequence:  Synthetic Peptide
VGFPLGWCRHLDTRGRFYYFNPTTGESTWQRPVTMM

SEQ ID NO: 50 - protein, 36 aa, Artificial Sequence
  Description of Artificial Sequence:  Synthetic Peptide
VKLPPGREQRTTVTGQVYFLHIKTKVTTWSDPRDPN

SEQ ID NO: 51 - protein, 37 aa, Artificial Sequence
  Description of Artificial Sequence:  Synthetic Peptide
TISQMSWTEHVAPQSGRKYYYNTLTKKSHWTKPDEEM

SEQ ID NO: 52 - protein, 36 aa, Artificial Sequence
  Description of Artificial Sequence:  Synthetic Peptide
GELPPKWEVVYTSNGRIFFIDHNHRTTSWVDPRTMY

SEQ ID NO: 53 - protein, 36 aa, Artificial Sequence
  Description of Artificial Sequence:  Synthetic Peptide
GPLPPPWEMAYTQQGQSYFINHKEKQTTWLRPEKHM

SEQ ID NO: 54 - protein, 36 aa, Artificial Sequence
  Description of Artificial Sequence:  Synthetic Peptide
TPTVSVWKDYLSQDNEIYYYNRITKISNWEKPDDLM

SEQ ID NO: 55 - protein, 36 aa, Artificial Sequence
  Description of Artificial Sequence:  Synthetic Peptide
TKLPSNWYEYKASSNLPYYYNALTRTTKWHRPADEA

SEQ ID NO: 56 - protein, 37 aa, Artificial Sequence
  Description of Artificial Sequence:  Synthetic Peptide
GPLPPGWEWRMHPLDGRPFYIDHNNKKTHWEDPRLLN

SEQ ID NO: 57 - protein, 36 aa, Artificial Sequence
  Description of Artificial Sequence:  Synthetic Peptide
EDPPAGWKVIVHRPDNKYYWNTITGECSWELPQLST

SEQ ID NO: 58 - protein, 37 aa, Artificial Sequence
  Description of Artificial Sequence:  Synthetic Peptide
EPLPPGWEIRQDRTMGRVYYVDHNTKTTSWNRPRPRT

SEQ ID NO: 59 - protein, 36 aa, Artificial Sequence
  Description of Artificial Sequence:  Synthetic Peptide
HTAPLDWEMFTDSSGKVYFYNCKTQTSQWEPPEPKL

SEQ ID NO: 60 - protein, 36 aa, Artificial Sequence
  Description of Artificial Sequence:  Synthetic Peptide
KGLTGTWKGYKDATGILYFWNSVTQQTQYEIPSAGP

SEQ ID NO: 61 - protein, 36 aa, Artificial Sequence
  Description of Artificial Sequence:  Synthetic Peptide
SPIPGDWCIVWDGDERVFFHNSVRRLSVWDRPVDGL

SEQ ID NO: 62 - protein, 36 aa, Artificial Sequence
  Description of Artificial Sequence:  Synthetic Peptide
HNLPKPWKGLIDGTTGYYFWNPETNVTQYENPTPPL

SEQ ID NO: 63 - protein, 37 aa, Artificial Sequence
  Description of Artificial Sequence:  Synthetic Peptide
PPLPAGWVTQWDNASKHYYYVQLSTGVSQWETPDDPA

SEQ ID NO: 64 - protein, 36 aa, Artificial Sequence
  Description of Artificial Sequence:  Synthetic Peptide
EGLPPGWEAKIDDAGISYYWHVRSNTTTWQRPTAPE

SEQ ID NO: 65 - protein, 36 aa, Artificial Sequence
  Description of Artificial Sequence:  Synthetic Peptide
SRLPSGWEWRLDQRGRTFYVDHVTRVTTWERPSQEA

SEQ ID NO: 66 - protein, 36 aa, Artificial Sequence
  Description of Artificial Sequence:  Synthetic Peptide
NHLLPGWSVAYDEVGDPYYYHDDGRKSQWDAPLNST

SEQ ID NO: 67 - protein, 36 aa, Artificial Sequence
  Description of Artificial Sequence:  Synthetic Peptide
QPLPDGWEEIVDPVKGRYYIDHNNQRTYWEKPSVLW

SEQ ID NO: 68 - protein, 36 aa, Artificial Sequence
  Description of Artificial Sequence:  Synthetic Peptide
VLHEDCWKEKQSDTGRKYYLNTVTNETCWEKPEEYP

SEQ ID NO: 69 - protein, 35 aa, Artificial Sequence
  Description of Artificial Sequence:  Synthetic Peptide
EPFPDGWEKRWDNNRRVYYVNHTKTTQWDRPEAED

SEQ ID NO: 70 - protein, 36 aa, Artificial Sequence
  Description of Artificial Sequence:  Synthetic Peptide
DKLPPEWYQTLSSSGYVYFYNAKTNITMWDRPTMER

SEQ ID NO: 71 - protein, 36 aa, Artificial Sequence
  Description of Artificial Sequence:  Synthetic Peptide
GIPPPGWKETTAQDGRTYYYNNTSKVSQWDKPSELL

SEQ ID NO: 72 - protein, 36 aa, Artificial Sequence
  Description of Artificial Sequence:  Synthetic Peptide
EGLPSGWEQRKDNHGRTYYVDHNTRSTTWEKPTPQA

SEQ ID NO: 73 - protein, 36 aa, Artificial Sequence
  Description of Artificial Sequence:  Synthetic Peptide
DTLPPGWEVKISQFGTCYYFDHTNKKAQWRHPLAES

SEQ ID NO: 74 - protein, 36 aa, Artificial Sequence
  Description of Artificial Sequence:  Synthetic Peptide
GKLPSGWEEAEAEYNKPYYVDKNTQISQFEKPQGED

SEQ ID NO: 75 - protein, 37 aa, Artificial Sequence
  Description of Artificial Sequence:  Synthetic Peptide
DPIVGPWCITWTEADSRVYFYNPVTRCSVWERPDALI

SEQ ID NO: 76 - protein, 36 aa, Artificial Sequence
  Description of Artificial Sequence:  Synthetic Peptide
SSLKPGWTEAIDDSGRIFYYNEEMKRTQWEHPGTAN

SEQ ID NO: 77 - protein, 37 aa, Artificial Sequence
  Description of Artificial Sequence:  Synthetic Peptide
GFLPDGWEMRFARPNGSPFFIDHNTKTTTWEDPRLKA

SEQ ID NO: 78 - protein, 36 aa, Artificial Sequence
  Description of Artificial Sequence:  Synthetic Peptide
PPSSASWTEHKSSDGEKYYYNNVTHQSKWEKPEELI

SEQ ID NO: 79 - protein, 36 aa, Artificial Sequence
  Description of Artificial Sequence:  Synthetic Peptide
EDLPPGWEERIDSYGRVFYVHHRNRSTQWERPTIPS

SEQ ID NO: 80 - protein, 35 aa, Artificial Sequence
  Description of Artificial Sequence:  Synthetic Peptide
TPLPQNWEVRTTSSNKVYFHNTSTGTSWVPPRDER

SEQ ID NO: 81 - protein, 33 aa, Artificial Sequence
  Description of Artificial Sequence:  Synthetic Peptide
SKASGGWVEYETQGKKFYYNKSTKESRWDKPAD

SEQ ID NO: 82 - protein, 36 aa, Artificial Sequence
  Description of Artificial Sequence:  Synthetic Peptide
ESLPPTWYKKFDSCGLPYYWNADTDLVSWLSPHDPN

SEQ ID NO: 83 - protein, 35 aa, Artificial Sequence
  Description of Artificial Sequence:  Synthetic Peptide
SKLPKGWEVRWTSSNKVYFFNQYTKTSWDPPVATS

SEQ ID NO: 84 - protein, 37 aa, Artificial Sequence
  Description of Artificial Sequence:  Synthetic Peptide
PSLPKSWRGLVDGTTGFLYFWNPETNATQYDRPSPSP

SEQ ID NO: 85 - protein, 33 aa, Artificial Sequence
  Description of Artificial Sequence:  Synthetic Peptide
EAAWQEGKSDDGKTYYYNPVTKESVWKKPKEFY

SEQ ID NO: 86 - protein, 36 aa, Artificial Sequence
  Description of Artificial Sequence:  Synthetic Peptide
EPLPPGWERRVDDMGRIYYVDHFTRTTTWQRPTMEA

SEQ ID NO: 87 - protein, 36 aa, Artificial Sequence
  Description of Artificial Sequence:  Synthetic Peptide
QGLPPPWERRVDPHGRVYYVNRKTRTTTWERPTSLP

SEQ ID NO: 88 - protein, 36 aa, Artificial Sequence
  Description of Artificial Sequence:  Synthetic Peptide
LPLPPNWATDWTLRGRKYYIDHNTHTTHWSHPLERE

SEQ ID NO: 89 - protein, 36 aa, Artificial Sequence
  Description of Artificial Sequence:  Synthetic Peptide
GFLPENWEMAYTENGEVYFIDHNTKTTSWLDPRCCN

SEQ ID NO: 90 - protein, 36 aa, Artificial Sequence
  Description of Artificial Sequence:  Synthetic Peptide
TPIPGTWCVVWTGDERVFFYNPRTRLSMWDRPDDLL

SEQ ID NO: 91 - protein, 36 aa, Artificial Sequence
  Description of Artificial Sequence:  Synthetic Peptide
GPLPPGWSRQEDQSGTIYYVDHNERRTQFKHPSEEL

SEQ ID NO: 92 - protein, 36 aa, Artificial Sequence
  Description of Artificial Sequence:  Synthetic Peptide
IVLPPNWTTARDTRGKSYYWNVTTRTTQWDPPTWEA

SEQ ID NO: 93 - protein, 36 aa, Artificial Sequence
  Description of Artificial Sequence:  Synthetic Peptide
RDLLNGWFEYITDVGRTYFFNKETGKSQWIPPRFIR

SEQ ID NO: 94 - protein, 37 aa, Artificial Sequence
  Description of Artificial Sequence:  Synthetic Peptide
EGLPPGWEKVESSEFGTSYYVDHTNKRAQYRHPCAPS

SEQ ID NO: 95 - protein, 37 aa, Artificial Sequence
  Description of Artificial Sequence:  Synthetic Peptide
AGLPPGWRKFEDSAAGTWYYWHVPSGSTQWQRPTWEL

SEQ ID NO: 96 - protein, 36 aa, Artificial Sequence
  Description of Artificial Sequence:  Synthetic Peptide
GPLPAGWERRVHADGRIFFIDHNIKRTQWEDPRLQN

SEQ ID NO: 97 - protein, 35 aa, Artificial Sequence
  Description of Artificial Sequence:  Synthetic Peptide
LDLPPGWEKHKAPQGYYYWHADSGEITRQPPPVVR

SEQ ID NO: 98 - protein, 36 aa, Artificial Sequence
  Description of Artificial Sequence:  Synthetic Peptide
GPLPPGWEKRTHTTGRVFFINHNTKITQWEDPRSQN

SEQ ID NO: 99 - protein, 36 aa, Artificial Sequence
  Description of Artificial Sequence:  Synthetic Peptide
NPLPSGWEMRKTPNGRPYFVNHNTKTTTWTDPRTQK

SEQ ID NO: 100 - protein, 37 aa, Artificial Sequence
  Description of Artificial Sequence:  Synthetic Peptide
KDLKKGWVEGFTPTEGYHYYYHLEDRASQYEPPVGFQ

SEQ ID NO: 101 - protein, 36 aa, Artificial Sequence
  Description of Artificial Sequence:  Synthetic Peptide
GPLPPGWEERIHLDGRTFYIDHNNKITQWEDPRLQN

SEQ ID NO: 102 - protein, 36 aa, Artificial Sequence
  Description of Artificial Sequence:  Synthetic Peptide
VILPPGWHSYLSPQGRRYYVNTTTNETTWKRPSSSP

SEQ ID NO: 103 - protein, 37 aa, Artificial Sequence
  Description of Artificial Sequence:  Synthetic Peptide
PTLPKGWRGLIAGNTGYLYYWNPETNAVQYERPLEPP

SEQ ID NO: 104 - protein, 36 aa, Artificial Sequence
  Description of Artificial Sequence:  Synthetic Peptide
DPLPPGWEERQDILGRTYYVNHESRTTQWKRPTPSD

SEQ ID NO: 105 - protein, 36 aa, Artificial Sequence
  Description of Artificial Sequence:  Synthetic Peptide
PGLPEGWEERKDAEGRTYYVNHNARTTTWTRPIVQL

SEQ ID NO: 106 - protein, 36 aa, Artificial Sequence
  Description of Artificial Sequence:  Synthetic Peptide
VPLPPGWEMHKTSSGQRYFLNHIDRTTTWQDPRKAM

SEQ ID NO: 107 - protein, 36 aa, Artificial Sequence
  Description of Artificial Sequence:  Synthetic Peptide
EALPYGWEKIQDMYGRKYYVDHLNQKTQFKNPSAEG

SEQ ID NO: 108 - protein, 37 aa, Artificial Sequence
  Description of Artificial Sequence:  Synthetic Peptide
VIARAAWSEHRAPPDGRPYYFHAGRGESVWEKPQALR

SEQ ID NO: 109 - protein, 36 aa, Artificial Sequence
  Description of Artificial Sequence:  Synthetic Peptide
QPLPPGWEIRKDNRGRTYYVHHNNRTTTWQRPTMED

SEQ ID NO: 110 - protein, 36 aa, Artificial Sequence
  Description of Artificial Sequence:  Synthetic Peptide
ELVHAGWEKCWSRENRPYYFNRFTNQSLWEMPGLTQ

SEQ ID NO: 111 - protein, 36 aa, Artificial Sequence
  Description of Artificial Sequence:  Synthetic Peptide
DPLPPGWERIVDSYGVSYYLDHINQTTQWERPVAEA

SEQ ID NO: 112 - protein, 36 aa, Artificial Sequence
  Description of Artificial Sequence:  Synthetic Peptide
EQLPAGWERRLDQYGRVYYVDHNTRSTYWEKPTELP

SEQ ID NO: 113 - protein, 36 aa, Artificial Sequence
  Description of Artificial Sequence:  Synthetic Peptide
GPLPEGWEKRQTSDSRVYFVNHVNRTTQWKDPRTQG

SEQ ID NO: 114 - protein, 36 aa, Artificial Sequence
  Description of Artificial Sequence:  Synthetic Peptide
SQLPPNWEMAYTEKGEKYYIDHNTQTTSWTIPSEVA

SEQ ID NO: 115 - protein, 35 aa, Artificial Sequence
  Description of Artificial Sequence:  Synthetic Peptide
HTLPKTWKGLIDRTGYLYYYNPETNTQYEKPTPSL

SEQ ID NO: 116 - protein, 36 aa, Artificial Sequence
  Description of Artificial Sequence:  Synthetic Peptide
DCLPEGWEEAYTADGIKYFINHNTQTTSWIHPCMSN

SEQ ID NO: 117 - protein, 37 aa, Artificial Sequence
  Description of Artificial Sequence:  Synthetic Peptide
GPLPAGWEMRLSREDYHVYFVDHSTKTSTWSDPRDNV

SEQ ID NO: 118 - protein, 36 aa, Artificial Sequence
  Description of Artificial Sequence:  Synthetic Peptide
TGLPESWEVKISSTNLPYFFNPETKKSLWEPPAGTD

SEQ ID NO: 119 - protein, 36 aa, Artificial Sequence
  Description of Artificial Sequence:  Synthetic Peptide
PPLPEGYEMRTTQQGQVFFLHTQTKVSTWHDPRIPR

SEQ ID NO: 120 - protein, 36 aa, Artificial Sequence
  Description of Artificial Sequence:  Synthetic Peptide
EALPSGWEQREDPHGRTYYVDHTTKTTTWDRPQPLP

SEQ ID NO: 121 - protein, 36 aa, Caenorhabditis elegans
KDLPPGWEKHEDPQGYSYYWHVDSGTIQRQPPPPVR

SEQ ID NO: 122 - protein, 36 aa, Drosophila melanogaster
DPLPPAWNWQVTSDGDIYYYNLRERISQWEPPSPEQ

SEQ ID NO: 123 - protein, 36 aa, Canis familiaris
GPLPPGWEKRVDSTDRVYFVNHNTKTTQWEDPRTQG

SEQ ID NO: 124 - protein, 36 aa, Bos taurus
VPLPAGWEMAKTSSGQRYFLNHIDQTTTWQDPRKAM

SEQ ID NO: 125 - protein, 36 aa, Homo sapiens
EPLPDGWIMTFHNSGVPVYLHRESRVVTWSRPYFLG

SEQ ID NO: 126 - protein, 36 aa, Pan troglodytes
SGLPPGWEEKQDERGRSYYVDHNSRTTTWTKPTVQA

SEQ ID NO: 127 - protein, 36 aa, Drosophila melanogaster
VIARAAWSEHRAPDGRPYYFHAGRGESVWEKPQALR

SEQ ID NO: 128 - protein, 36 aa, Gallus gallus
GPLPPGWEIRNTATGRVYFVDHNNRTTQFTDPRLSA

SEQ ID NO: 129 - protein, 36 aa, Mus musculus
GELPYGWEKIEDPQYGTYYVDHLNQKTQFENPVEEA

SEQ ID NO: 130 - protein, 37 aa, Bos taurus
EKLPPGWEKRMSRSSGRVYYFNHITNASQWERPSGNS

SEQ ID NO: 131 - protein, 37 aa, Homo sapiens
EGLPPSWYKVFDPSCGLPYYWNADTDLVSWLSPHDPN

SEQ ID NO: 132 - protein, 36 aa, Oryza sativa
DKLAGTWSIVTTSDGKKYYYDNKLKVSSWQLPPEVA

SEQ ID NO: 133 - protein, 36 aa, Pan troglodytes
GPLPPGWEERTHTDGRIFYINHNIKRTQWEDPRLEN

SEQ ID NO: 134 - protein, 36 aa, Mus musculus
EGLPPGWERVESSEFGTYYVDHTNKRAQYRHPCAPS

SEQ ID NO: 135 - protein, 36 aa, Rattus norvegicus
EPLPKNWEMAYTDTGTIYFIDHNTKTTTWLDPRLCK

SEQ ID NO: 136 - protein, 36 aa, Mus musculus
KTAAKAWVEGLSEDGYTYYYNTETGESKWEKPEDFI

SEQ ID NO: 137 - protein, 36 aa, Mus musculus
LPLPPGWSVDWTMRGRKYYIDHNTNTTHWSHPLERE

SEQ ID NO: 138 - protein, 36 aa, Arabidopsis thaliana
ESLPGTWALVSTNDGKKYYYNNKTKVSSWQIPAEVK

SEQ ID NO: 139 - protein, 35 aa, Caenorhabditis elegans
TPPESWKTYLDAKKRKFYVNHVTKETRWTKPDTLN

SEQ ID NO: 140 - protein, 36 aa, Drosophila melanogaster
VTGPPEWVETKAEDGRSYYYHAVTRETTWSRPDGPA

SEQ ID NO: 141 - protein, 36 aa, Arabidopsis thaliana
GNRLDAWTAHKSEAGVLYYYNSVTGQSTYEKPPGFG

SEQ ID NO: 142 - protein, 36 aa, Homo sapiens
ELLLSQWKEYKSDTGKPYYYNNQSQESRWTRPKDLD

SEQ ID NO: 143 - protein, 36 aa, Mus musculus
KPLPEGWEMRFTVDGIPYFVDHNRRATTYIDPRTGK

SEQ ID NO: 144 - protein, 36 aa, Schizosaccharomyces pombe
GPLPAGWEMRLSEDYHVYFVDHSTKTTTWSDPRDNV

SEQ ID NO: 145 - protein, 36 aa, Anopheles gambiae
AQVGNGWVEAETDEGFPYYWNVKTGESTWETPKEGF

SEQ ID NO: 146 - protein, 36 aa, Caenorhabditis elegans
STPVSGWCVVWTGDDKVFFYNPSTKCSVWERPPDTY

SEQ ID NO: 147 - protein, 37 aa, Arabidopsis thaliana
PTLPQPWKGLIDGSTGILYYWNPETNVTQYERPSAPP

SEQ ID NO: 148 - protein, 36 aa, Caenorhabditis elegans
CEEGQEWVETETAEGKKYFYHPVNRNTIWERPQNSK

SEQ ID NO: 149 - protein, 36 aa, Drosophila melanogaster
LDLPPGYEMRTTQQGQVYFYHIPTGVSTWHDPRIPR

SEQ ID NO: 150 - protein, 36 aa, Gallus gallus
GPLPPGWEERIHMDGRTFYIDHNTKITQWEDPRLQN

SEQ ID NO: 151 - protein, 36 aa, Aspergillus nidulans
GRLPAGWERREDNLGRTYYVDHNTRTTTWNRPSANY

SEQ ID NO: 152 - protein, 36 aa, Homo sapiens
ISLPRSWTYGITRGGRVFFINEEAKSTTWLHPVTGE

SEQ ID NO: 153 - protein, 36 aa, Drosophila melanogaster
DSLPEGWEERRTDNGRVYYVNHATKSTQWDRPRQPG

SEQ ID NO: 154 - protein, 36 aa, Caenorhabditis briggsae
HGIPQGWEEREDGNGRTVYINHALRTTQFTPPESIP

SEQ ID NO: 155 - protein, 37 aa, Neurospora crassa
TGLPEDWEVRHSQSKNLPYYFNSATKTSRWEPPSGTD

SEQ ID NO: 156 - protein, 35 aa, Trypanosoma brucei
APLPEHWKACRSEKGELYYFNKTGESIWDHPLDEH

SEQ ID NO: 157 - protein, 35 aa, Homo sapiens
APLPGEWKPCQDITGDIYYFNANGQSMWDHPCDEH

SEQ ID NO: 158 - protein, 36 aa, Oryza sativa
KLAGTDWSIVTTSDGKKYYYDNKLKVSSWQLPPEVA

SEQ ID NO: 159 - protein, 37 aa, Magnaporthe grisea
PHLPSGWIAQWDGQSRKYYFVELATGRSQWEIPTKPA

SEQ ID NO: 160 - protein, 36 aa, Anopheles gambiae
EPLPPAWEARMDSHGRIFYIDHATRTTSWQRPGPLG

SEQ ID NO: 161 - protein, 309 aa, Artificial Sequence
  Description of Artificial Sequence:  Synthetic Peptide
MVRIYTLTLAPSLDSATITPQIYPEGKLRCTAPVFEPGGGGINVARAIAHLGGSATAIFPAGGATGEHLVSLLADENVPVATVEAKDWTRQNLHVHVEASGEQYRFVMPGAALNEDEFRQLEEQVLEIESGAILVISGSLPPGVKLEKLTQLISAAQKQGIRCIVDSSGEALSAALAIGNIELVKPNQKELSALVNRELTQPDDVRKAAQEIVNSGKAKRVVVSLGPQGALGVDSENCIQVVPPPVKSQSTVGAGDSMVGAMTLKLAENASLEEMVRFGVAAGSAATLNQGTRLCSHDDTQKIYAYLSR

SEQ ID NO: 162 - protein, 16 aa, Artificial Sequence
  Description of Artificial Sequence:  Synthetic Peptide
  MOD_RES (4)..(12): x = any natural occuring amino acid
GMAXXXXPXXXXAKKK

SEQ ID NO: 163 - protein, 18 aa, Artificial Sequence
  Description of Artificial Sequence:  Synthetic Peptide
  MOD_RES (4)..(13)
GMAXXXPPXYXXXAKKKC

SEQ ID NO: 164 - protein, 17 aa, Artificial Sequence
  Description of Artificial Sequence:  Synthetic Peptide
  MOD_RES (4)..(13): x = any natural occuring amino acid
GMAXXXPPLPXXXAKKK

SEQ ID NO: 165 - protein, 16 aa, Artificial Sequence
  Description of Artificial Sequence:  Synthetic Peptide
  MOD_RES (4)..(14)
GMAXXXPPRXXXAKKK

SEQ ID NO: 166 - protein, 18 aa, Artificial Sequence
  Description of Artificial Sequence:  Synthetic Peptide
  MOD_RES (4)..(12)
GMAXXXXPSPXXXXAKKK

SEQ ID NO: 167 - protein, 14 aa, Artificial Sequence
  Description of Artificial Sequence:  Synthetic Peptide
  MOD_RES (2)..(10)
GXXXXPXXXXAKKK

SEQ ID NO: 168 - protein, 15 aa, Artificial Sequence
  Description of Artificial Sequence:  Synthetic Peptide
  MOD_RES (2)..(11)
GXXXPPXYXXXAKKK

SEQ ID NO: 169 - protein, 15 aa, Artificial Sequence
  Description of Artificial Sequence:  Synthetic Peptide
  MOD_RES (2)..(11)
GXXXPPLPXXXAKKK

SEQ ID NO: 170 - protein, 16 aa, Artificial Sequence
  Description of Artificial Sequence:  Synthetic Peptide
  MOD_RES (2)..(12)
GXXXXPSPXXXXAKKK

SEQ ID NO: 171 - protein, 14 aa, Artificial Sequence
  Description of Artificial Sequence:  Synthetic Peptide
  MOD_RES (2)..(10)
GXXXPPRXXXAKKK

SEQ ID NO: 172 - protein, 77 aa, Artificial Sequence
  Description of Artificial Sequence:  Synthetic Peptide
AEGYQYRALYDYKKEREEDIDLHLGDILTVNKGSLVALGFSDGQEAKPEEIGWLNGYNETTGERGDFPGTYVEYIGR

SEQ ID NO: 173 - protein, 60 aa, Artificial Sequence
  Description of Artificial Sequence:  Synthetic Peptide
QPKKYAKSKYDFVARNSSELSVMKDDVLEILDDRRQWWKVRNASGDSGFVPNNILDIMRT

SEQ ID NO: 174 - protein, 64 aa, Artificial Sequence
  Description of Artificial Sequence:  Synthetic Peptide
PPEKLFQAERNFNAAQDLDVSLLEGDLVGVIKKKDPMGSQNRWLIDNGVTKGFVYSSFLKPYNP

SEQ ID NO: 175 - protein, 61 aa, Artificial Sequence
  Description of Artificial Sequence:  Synthetic Peptide
NDPNLFVALYDFVASGDNTLSITKGEKLRVLGYNHNGEWFEAQTKNGQGWVPSNYITPVNS

SEQ ID NO: 176 - protein, 77 aa, Artificial Sequence; identical to SEQ ID NO: 172
  Description of Artificial Sequence:  Synthetic Peptide

SEQ ID NO: 177 - protein, 60 aa, Artificial Sequence; identical to SEQ ID NO: 173
  Description of Artificial Sequence:  Synthetic Peptide

SEQ ID NO: 178 - protein, 64 aa, Artificial Sequence; identical to SEQ ID NO: 174
  Description of Artificial Sequence:  Synthetic Peptide

SEQ ID NO: 179 - protein, 61 aa, Artificial Sequence; identical to SEQ ID NO: 175
  Description of Artificial Sequence:  Synthetic Peptide

SEQ ID NO: 180 - protein, 61 aa, Artificial Sequence
  Description of Artificial Sequence:  Synthetic Peptide
NDPNLFVALYDFVASGDNTLSITKGEKLRVLGYNHNGEWCEAQTKNGQGWVPSNYITPVNS

SEQ ID NO: 181 - protein, 61 aa, Artificial Sequence
  Description of Artificial Sequence:  Synthetic Peptide
SDPNLFVALYDFVASGDNTLSITKGEKLRVLGYNQNGEWSEVRSKNGQGWVPSNYITPVNS

SEQ ID NO: 182 - protein, 62 aa, Artificial Sequence
  Description of Artificial Sequence:  Synthetic Peptide
DDPQLFVALYDFQAGGENQLSLKKGEQVRILSYNKSGEWCEAHSDSGNVGWVPSNYVTPLNS

SEQ ID NO: 183 - protein, 62 aa, Artificial Sequence
  Description of Artificial Sequence:  Synthetic Peptide
DDPQLFVALYDFKAGGENQLSLRKGEQVRILSYNKSGEWCEAHSDSGHVGWVPSNYVTPLNS

SEQ ID NO: 184 - protein, 74 aa, Artificial Sequence
  Description of Artificial Sequence:  Synthetic Peptide
SSAPLFVALYDFHGVGEEQLSLRKGDQVRILGYNKNNEWCEARLYSTRKNDASNQRRLGEIGWVPSNFIAPYNS

SEQ ID NO: 185 - protein, 63 aa, Artificial Sequence
  Description of Artificial Sequence:  Synthetic Peptide
HDPDLFVVLYDFNGGVENQLTVRKGDHVRILGYNKGGEWCEAKKLKNGKTGWVPVTYVTPFNS

SEQ ID NO: 186 - protein, 64 aa, Artificial Sequence
  Description of Artificial Sequence:  Synthetic Peptide
VDEQIFYAVHAFQARSDHELSLQEYQRVHILRFCDLSGNKEWWLAEAQGQKGYVPANYLGKMTY

SEQ ID NO: 187 - protein, 64 aa, Artificial Sequence
  Description of Artificial Sequence:  Synthetic Peptide
PTMSQVVAVYPFVARSTHELSLQAGQPVTILEAQDKKGNPEWSLVEANGQRGYVPSNFLARTPS

SEQ ID NO: 188 - protein, 64 aa, Artificial Sequence
  Description of Artificial Sequence:  Synthetic Peptide
EGNQVYFAVYTFKARNPNELSVSANQKLKILEFKDVTGNTEWWLAEVNGKKGYVPSNYIRKTEY

SEQ ID NO: 189 - protein, 64 aa, Artificial Sequence
  Description of Artificial Sequence:  Synthetic Peptide
EGNQVYFAIYTFKARNPNELSVLANQRLRIHEFKDVTGNTEWWLAEVNGRKGYVPSNYIRKTEY

SEQ ID NO: 190 - protein, 58 aa, Artificial Sequence
  Description of Artificial Sequence:  Synthetic Peptide
MYRALYAFRSAEPNALAFAAGETFLVLERSSAHWWLAARARSGETGYVPPAYLRRLQG

SEQ ID NO: 191 - protein, 58 aa, Artificial Sequence
  Description of Artificial Sequence:  Synthetic Peptide
MYRALYAFRSGAPNAMAFAAGETFLVLERSSTHWWLAARARSGETGYVPPAYLHRLQG

SEQ ID NO: 192 - protein, 65 aa, Artificial Sequence
  Description of Artificial Sequence:  Synthetic Peptide
PVLCQVKVDYDFLPQGSNQVEVKEGEVIGVLQRTDDDGNPEWLLIKRDSGKVGYVPAAYYYVIAS

SEQ ID NO: 193 - protein, 71 aa, Artificial Sequence
  Description of Artificial Sequence:  Synthetic Peptide
GNQEATWVVADYIATSGSNELSVSKGQQVEIVEPPTAGEPDFCLVRLNPQHDDAAVQEGLVPVSVLKPPPG

SEQ ID NO: 194 - protein, 69 aa, Artificial Sequence
  Description of Artificial Sequence:  Synthetic Peptide
GLAEMTWVIADHTAAPGTSELSVSKGQQVEIVDMNCSGAPDYCLVRLSINASDSQEGLVPVTVLKPLPS

SEQ ID NO: 195 - protein, 66 aa, Artificial Sequence
  Description of Artificial Sequence:  Synthetic Peptide
GGCELTVVLQDFSAAHSSELSIQVGQTVELLERPSERPGWCLVRTTERSPPQEGLVPSSTLCISHS

SEQ ID NO: 196 - protein, 61 aa, Artificial Sequence
  Description of Artificial Sequence:  Synthetic Peptide
EPSGRCIVLYTFIARDENDLSVERGEFVTVLNREDPDWFWIMRSDGQEGFVPASFIYPADS

SEQ ID NO: 197 - protein, 61 aa, Artificial Sequence
  Description of Artificial Sequence:  Synthetic Peptide
DPSGRYIVLYTFIARDENDVSVERGEFVTVLNREDPEWFWIVRSDGQEGFIPSGFVYPAEN

SEQ ID NO: 198 - protein, 61 aa, Artificial Sequence
  Description of Artificial Sequence:  Synthetic Peptide
SPDSKMVVLHDFTPCVDDELEVKRGQIVNILYRENDWVYVIGQDTRQEGFIPHSYCAPFNT

SEQ ID NO: 199 - protein, 63 aa, Artificial Sequence
  Description of Artificial Sequence:  Synthetic Peptide
GKKKKGAVLYDFMAQGEDEVTVGVGDEVVILDDTKSDEWWMVRRVKNGKEGVVPSSYIEINGV

SEQ ID NO: 200 - protein, 63 aa, Artificial Sequence
  Description of Artificial Sequence:  Synthetic Peptide
KSKKRGIVQYDFMAESQDELTIKSGDKVYILDDKKSKDWWMCQLVDSGKSGLVPAQFIEPVRD

SEQ ID NO: 201 - protein, 61 aa, Artificial Sequence
  Description of Artificial Sequence:  Synthetic Peptide
AGQKMGTVLYDFIAEAADELTVKANMRVVIVNDTASSDWWKCSVDGKEGVVPSNFIKPDTE

SEQ ID NO: 202 - protein, 67 aa, Artificial Sequence
  Description of Artificial Sequence:  Synthetic Peptide
SKLEFARALYDFVPENPEMEVALKKGDLMAILSKKDPLGRDSDWWKVRTKNGNIGYIPYNYIEIIKR

SEQ ID NO: 203 - protein, 68 aa, Artificial Sequence
  Description of Artificial Sequence:  Synthetic Peptide
TKLEFARALYDFNPENEEMELKLARGELMAILSKTEPNSNQESTWWKCRSRDGKVGFVPYNYVEIIER

SEQ ID NO: 204 - protein, 67 aa, Artificial Sequence
  Description of Artificial Sequence:  Synthetic Peptide
DSLEFCKADYEFMSRDPGVEMSLKKGDIIAILSKTDTQGNPCEWWQGRKRSGETGWFPSNYCSIISR

SEQ ID NO: 205 - protein, 62 aa, Artificial Sequence
  Description of Artificial Sequence:  Synthetic Peptide
PQVARYKALYVFATENAGEMALDKDDVVEVTQKDETGSGWWLVKKNGVEGWAPSNYLELIVQ

SEQ ID NO: 206 - protein, 62 aa, Artificial Sequence
  Description of Artificial Sequence:  Synthetic Peptide
AGPKKAKALYDFSSDNNGMLSISAGQIVEIVSKEGNGWWLCMNLETSAQGWTPEAYLEEQVA

SEQ ID NO: 207 - protein, 58 aa, Artificial Sequence
  Description of Artificial Sequence:  Synthetic Peptide
MEAIAKYDFKATADDELSFKRGDVLKALNEECDQNWYKAELNGKDGFIPKNYIEMKAH

SEQ ID NO: 208 - protein, 58 aa, Artificial Sequence
  Description of Artificial Sequence:  Synthetic Peptide
MEAIAKYDFKATADDELSFKRGDVLKVLNEECDQNWYKAELNGKDGFIPKNYIEMKAH

SEQ ID NO: 209 - protein, 61 aa, Artificial Sequence
  Description of Artificial Sequence:  Synthetic Peptide
VGSMEAIAKYDFKATADDELSFKRGDILKVLNEECDQNWYKAELNGKDGFIPKNYIEMKPH

SEQ ID NO: 210 - protein, 58 aa, Artificial Sequence
  Description of Artificial Sequence:  Synthetic Peptide
MEAIAKYDFKATADDELSFKRGDILKVLNEECDQNWYKAELNGKGGFIPKNYIEMKPH

SEQ ID NO: 211 - protein, 60 aa, Artificial Sequence
  Description of Artificial Sequence:  Synthetic Peptide
MEAIAKYDFKPTVEDELSFKGGGGGILKVLNEECDQNWYKAELNGKDGFIPKNYIEMKHI

SEQ ID NO: 212 - protein, 58 aa, Artificial Sequence
  Description of Artificial Sequence:  Synthetic Peptide
MEAIAKHDFSATADDELSFRKTQILKILNMEDDSNWYRAELDGKEGLIPSNYIEMKNH

SEQ ID NO: 213 - protein, 58 aa, Artificial Sequence
  Description of Artificial Sequence:  Synthetic Peptide
MEAVAKHDFNATADDELSFRKSQVLKILNMEDDMNWYRAELDGKEGLIPSNYIEMKNH

SEQ ID NO: 214 - protein, 58 aa, Artificial Sequence
  Description of Artificial Sequence:  Synthetic Peptide
MESVALYSFQATESDELAFNKGDTLKILNMEDDQNWYKAELRGAEGFVPKNYIRVKPH

SEQ ID NO: 215 - protein, 58 aa, Artificial Sequence
  Description of Artificial Sequence:  Synthetic Peptide
MESVALYSFQATESDELAFNKGDTLKILNMEDDQNWYKAELRGVEGFIPKNYIRVKPH

SEQ ID NO: 216 - protein, 58 aa, Artificial Sequence
  Description of Artificial Sequence:  Synthetic Peptide
MEAVAEHDFQAGSPDELSFKRGNTLKVLNKDEDPHWYKAELDGNEGFIPSNYIRMTEC

SEQ ID NO: 217 - protein, 58 aa, Artificial Sequence
  Description of Artificial Sequence:  Synthetic Peptide
MEAEASYDFVANAEDELGFKKGSILKILCVEDDPNWYLAEQEGRTGLIPCNYITMRPH

SEQ ID NO: 218 - protein, 62 aa, Artificial Sequence
  Description of Artificial Sequence:  Synthetic Peptide
PSGTECIAKYNFHGTAEQDLPFCKGDVLTIVAVTKDPNWYKAKNKVGREGIIPANYVQKREG

SEQ ID NO: 219 - protein, 62 aa, Artificial Sequence
  Description of Artificial Sequence:  Synthetic Peptide
PSGTECIAKYNFHGTAEQDLPFSKGDVLTIVAVTKDPNWYKAKNKVGREGIIPANYVQKREG

SEQ ID NO: 220 - protein, 62 aa, Artificial Sequence
  Description of Artificial Sequence:  Synthetic Peptide
QAGIECIANYDFQGKAEQDLDFSKGEVLTIVAVTKDPNWYKAKNKVGRVGFIPANYVQKREG

SEQ ID NO: 221 - protein, 62 aa, Artificial Sequence
  Description of Artificial Sequence:  Synthetic Peptide
AVGTECIGKYNFPGSSPHDLPFKKGDRLVIVAPSKDPNWYKARREDGLEGMIPFNYVQEKVP

SEQ ID NO: 222 - protein, 63 aa, Artificial Sequence
  Description of Artificial Sequence:  Synthetic Peptide
PNGTECVARYDFKGNSEKDLPFKKGDIIEILQSTRDPNWYNAKKVSDGRTGLIPINYVQQRRA

SEQ ID NO: 223 - protein, 61 aa, Artificial Sequence
  Description of Artificial Sequence:  Synthetic Peptide
STGEEYIAVGDFTAQQVGDLTFKKGEILLVIEKKPDGWWIAKDAKGNEGLVPRTYLEPYSE

SEQ ID NO: 224 - protein, 61 aa, Artificial Sequence
  Description of Artificial Sequence:  Synthetic Peptide
ATSKEYIAVGDFTAQQAGDLTFKKREILLIIEKKPDGWWIAKNAKGNKGLIPRTYVEPYNK

SEQ ID NO: 225 - protein, 61 aa, Artificial Sequence
  Description of Artificial Sequence:  Synthetic Peptide
TETVTYIALGDFAAQQTGDLTFKKGDVLHIIEKKPDGWWLAKDAEGVEGLIPRTYLEPYNK

SEQ ID NO: 226 - protein, 61 aa, Artificial Sequence
  Description of Artificial Sequence:  Synthetic Peptide
RRVEKVIGKFDFVGSDQDDLPFQRGEVLTIVRKDEDQWWTARNSSGKIGQIPVPYIQQYDD

SEQ ID NO: 227 - protein, 59 aa, Artificial Sequence
  Description of Artificial Sequence:  Synthetic Peptide
GSAEYVRALFDFNGNDEEDLPFKKGDILRIRDKPEEQWWNAEDSEGKRGMIPVPYVEKY

SEQ ID NO: 228 - protein, 61 aa, Artificial Sequence
  Description of Artificial Sequence:  Synthetic Peptide
GEAEYVRALFDFNGNDEEDLPFKKGDMLRIRDKPEEQWWNAEDSEGKRGMIPVPYVEKYRQ

SEQ ID NO: 229 - protein, 61 aa, Artificial Sequence
  Description of Artificial Sequence:  Synthetic Peptide
EEVEYLRALFDFIGNDDEDLPFKKGDILRIREKPEEQWWNAEDSDGRRGMIPVPYVEKYRP

SEQ ID NO: 230 - protein, 61 aa, Artificial Sequence
  Description of Artificial Sequence:  Synthetic Peptide
EEVEYVRALFDFNGNDDEDLPFKKGDILKIRDKPEEQWWNAEDMDGKRGMIPVPYVEKCRP

SEQ ID NO: 231 - protein, 61 aa, Artificial Sequence
  Description of Artificial Sequence:  Synthetic Peptide
EEVEYVRALFDFKGNDDGDLPFKKGDILKIRDKPEEQWWNAEDMDGKRGMIPVPYVEKCRP

SEQ ID NO: 232 - protein, 61 aa, Artificial Sequence
  Description of Artificial Sequence:  Synthetic Peptide
ENLEYVRTLYDFPGNDAEDLPFKKGELLVIIEKPEEQWWSARTKDGRVGMIPVPYVEKLVR

SEQ ID NO: 233 - protein, 61 aa, Artificial Sequence
  Description of Artificial Sequence:  Synthetic Peptide
ENLEYVRTLYDFPGNDAEDLPFKKGELLVIIEKPEEQWWSARNKDGRVGMIPVPYVEKLVR

SEQ ID NO: 234 - protein, 61 aa, Artificial Sequence
  Description of Artificial Sequence:  Synthetic Peptide
DNLEYVRTLYDFPGNDAEDLPFKKGEILVIIEKPEEQWWSARNKDGRVGMIPVPYVEKLVR

SEQ ID NO: 235 - protein, 63 aa, Artificial Sequence
  Description of Artificial Sequence:  Synthetic Peptide
NVLDIVVALYSFTSNNDQELSFEKGDRLEIVDRPASDPDWYKARNNQGQVGLVPRNYLQELND

SEQ ID NO: 236 - protein, 63 aa, Artificial Sequence
  Description of Artificial Sequence:  Synthetic Peptide
FEIQVVVALYSFDASSSEELSFKKGERLEIVDHPEHDPDWWMARNASGTTGLVPRNYIEVVVN

SEQ ID NO: 237 - protein, 63 aa, Artificial Sequence
  Description of Artificial Sequence:  Synthetic Peptide
SSFEVVVALYSFDASSSEELSFKKGERLEIVDHPEHDPDWWMARNASGTTGLVPRNYIEVVVN

SEQ ID NO: 238 - protein, 61 aa, Artificial Sequence
  Description of Artificial Sequence:  Synthetic Peptide
PIIEVVVGTFKFTGERETDLPFEQGERLEILSKTNQDWWEARNALGTTGLVPANYVQIQME

SEQ ID NO: 239 - protein, 63 aa, Artificial Sequence
  Description of Artificial Sequence:  Synthetic Peptide
RVLHVVQTLYPFSSVTEEELSFEKGETMEVIEKPENDPEWWKCKNARGQVGLVPKNYVVVLSD

SEQ ID NO: 240 - protein, 63 aa, Artificial Sequence
  Description of Artificial Sequence:  Synthetic Peptide
RVLHVVQTLYPFSSVTEEELNFEKGETMEVIEKPENDPEWWKCKNARGQVGLVPKNYVVVLSD

SEQ ID NO: 241 - protein, 63 aa, Artificial Sequence
  Description of Artificial Sequence:  Synthetic Peptide
SVLHVVQTLYPFSSVTEEELNFEKGETMEVLEKPENDPEWWRCKNSRGIVGLVPKNYVVVLDD

SEQ ID NO: 242 - protein, 63 aa, Artificial Sequence
  Description of Artificial Sequence:  Synthetic Peptide
QVLHVVQALYPFSSSNDEELNFEKGDVMDVIEKPENDPEWWKCRKINGMVGLVPKNYVTIMQN

SEQ ID NO: 243 - protein, 63 aa, Artificial Sequence
  Description of Artificial Sequence:  Synthetic Peptide
QVLHVVQALYPFSSSNDEELNFEKGDVMDVIEKPENDPEWWKCRKINGMVGLVPKNYVTVMQN

SEQ ID NO: 244 - protein, 63 aa, Artificial Sequence
  Description of Artificial Sequence:  Synthetic Peptide
QVLHVVQALYPFGSSNNEELNFEKGDVMDVIEKPENDPEWWKCRKINGMVGLVPKNYVTIMQN

SEQ ID NO: 245 - protein, 63 aa, Artificial Sequence
  Description of Artificial Sequence:  Synthetic Peptide
RSLHVVQALYPFSSSNEEELNFEKGEVMDVIEKPENDPEWWKCQKSNGLVGLVPKNYVTIMQN

SEQ ID NO: 246 - protein, 61 aa, Artificial Sequence
  Description of Artificial Sequence:  Synthetic Peptide
PEETLVIALYDYQTNDPQELALRCDEEYYLLDSSEIHWWRVQDKNGHEGYAPSSYLVEKSP

SEQ ID NO: 247 - protein, 61 aa, Artificial Sequence
  Description of Artificial Sequence:  Synthetic Peptide
PEETVVIALYDYQTNDPQELALRRNEEYCLLDSSEIHWWRVQDRNGHEGYVPSSYLVEKSP

SEQ ID NO: 248 - protein, 61 aa, Artificial Sequence
  Description of Artificial Sequence:  Synthetic Peptide
TELKKVVALYDYMPMNANDLQLRKGEEYFILEESNLPWWRARDKNGQEGYIPSNYITEAED

SEQ ID NO: 249 - protein, 58 aa, Artificial Sequence
  Description of Artificial Sequence:  Synthetic Peptide
  MOD_RES (1): x = any natural occuring amino acid
XKKVVALYDYMPMNANDLQLRKGDEYFILEESNLPWWRARDKNGQEGYIPSNYVTEAE

SEQ ID NO: 250 - protein, 61 aa, Artificial Sequence
  Description of Artificial Sequence:  Synthetic Peptide
GEMKKVVALYNYVPMNVQDLQLQKGEDYLILEESHLPWWKARDKNGREGYIPSNYVTATSN

SEQ ID NO: 251 - protein, 61 aa, Artificial Sequence
  Description of Artificial Sequence:  Synthetic Peptide
SVGMTVTAEYNYLPMTTQDLELKKDEEYTILEMSDPNWWRARDKYGNEGYIPSNYVVEAEN

SEQ ID NO: 252 - protein, 61 aa, Artificial Sequence
  Description of Artificial Sequence:  Synthetic Peptide
ASRKVVVALYDYDIMNPDDLPLRKDQEYVVLEQGAHNWWRARDAQGREGFIPSNYVVETRD

SEQ ID NO: 253 - protein, 61 aa, Artificial Sequence
  Description of Artificial Sequence:  Synthetic Peptide
NTEEIVVAMYDFQATEAHDLRLERGQKYIILEKNDTHRWRARDKYGSEGYIPSNYVTGKKS

SEQ ID NO: 254 - protein, 61 aa, Artificial Sequence
  Description of Artificial Sequence:  Synthetic Peptide
NTEEIVVAMYDFQATEAHDLRLERGQEYIILEKNDLHWWRARDKYGSEGYIPSNYVTGKKS

SEQ ID NO: 255 - protein, 61 aa, Artificial Sequence
  Description of Artificial Sequence:  Synthetic Peptide
NSEEIVVAMYDFQAAEGHDLRLERGQEYLILEKNDVHWWRARDKYGNEGYIPSNYVTGKKS

SEQ ID NO: 256 - protein, 61 aa, Artificial Sequence
  Description of Artificial Sequence:  Synthetic Peptide
DERIQVKALYDFLPREPGNLALKRAEEYLILERCDPHWWKARDRFGNEGLIPSNYVTENRL

SEQ ID NO: 257 - protein, 61 aa, Artificial Sequence
  Description of Artificial Sequence:  Synthetic Peptide
EEKIQVKALYDFLPREPCNLALRRAEEYLILEKYNPHWWKARDRLGNEGLIPSNYVTENKI

SEQ ID NO: 258 - protein, 61 aa, Artificial Sequence
  Description of Artificial Sequence:  Synthetic Peptide
PRVKIVVALYPFKAIESGDLSLEKNAEYEVIDDSQEHWWKVKDQHGTIGYIPSNYVKEKEL

SEQ ID NO: 259 - protein, 61 aa, Artificial Sequence
  Description of Artificial Sequence:  Synthetic Peptide
HFVKLVVALYPFKAIEGGDLSLEKNAEYEVIDDSQEHWWKVKDALGNVGYIPSNYVKPKAL

SEQ ID NO: 260 - protein, 61 aa, Artificial Sequence
  Description of Artificial Sequence:  Synthetic Peptide
PEERIVVALRNFIPKEHTDLPLQKDEEYFIVDCSEPNWWTVKDKDGNVGSVPCIYVTEKLS

SEQ ID NO: 261 - protein, 61 aa, Artificial Sequence
  Description of Artificial Sequence:  Synthetic Peptide
PSDFDVIAMYDYPGLERGDLPLVKGQRVTVFDATREFWWRARDEQGSEGYIPSNYVKKMGL

SEQ ID NO: 262 - protein, 68 aa, Artificial Sequence
  Description of Artificial Sequence:  Synthetic Peptide
GGVTTFVALYDYESRTETDLSFKKGERLQIVNNTRKVDVREGDWWLAHSLSTGQTGYIPSNYVAPSDS

SEQ ID NO: 263 - protein, 62 aa, Artificial Sequence
  Description of Artificial Sequence:  Synthetic Peptide
GGVTTFVALYDYESRTETDLSFKKGERLQIVNNTEGDWWLAHSLSTGQTGYIPSNYVAPSDS

SEQ ID NO: 264 - protein, 62 aa, Artificial Sequence
  Description of Artificial Sequence:  Synthetic Peptide
GGVTTFVALYDYESRTETDLSFKKGERLQIVNNTEGDWWLAHSLSTGQTGYIPSNYVAPFDS

SEQ ID NO: 265 - protein, 62 aa, Artificial Sequence
  Description of Artificial Sequence:  Synthetic Peptide
GGVTTFVALYDYESRTETDLSFKKGERLQIVNNTEGDWWLAHSLTTGQTGYIPSNYVAPSDS

SEQ ID NO: 266 - protein, 62 aa, Artificial Sequence
  Description of Artificial Sequence:  Synthetic Peptide
GGVTTFVALYDYESWTETDLSFKKGERLQIVNNTEGDWWLAHSLTTGQTGYIPSNYVAPSDS

SEQ ID NO: 267 - protein, 62 aa, Artificial Sequence
  Description of Artificial Sequence:  Synthetic Peptide
GGVTTFVALYDYESWTETDLSFKKGERLQIVNNTEGYWWLAHSLTTGQTGYIPSNYVAPSDS

SEQ ID NO: 268 - protein, 62 aa, Artificial Sequence
  Description of Artificial Sequence:  Synthetic Peptide
GGVTTFVALYDYESWIETDLSFKKGERLQIVNNTEGNWWLAHSVTTGQTGYIPSNYVAPSDS

SEQ ID NO: 269 - protein, 62 aa, Artificial Sequence
  Description of Artificial Sequence:  Synthetic Peptide
GGVTTFVALYDYESRTETDLSFRKGERLQIVNNTEGDWWLARSLSSGQTGYIPSNYVAPSDS

SEQ ID NO: 270 - protein, 67 aa, Artificial Sequence
  Description of Artificial Sequence:  Synthetic Peptide
GGVTTFVALYDYESRTETDLSFRKGERLQIVNNTRPDMREGDWWLARSLSSGQTGYIPSNYVAPSDS

SEQ ID NO: 271 - protein, 62 aa, Artificial Sequence
  Description of Artificial Sequence:  Synthetic Peptide
GGVTTFVALYDYESRTETDLSFKKGERLQIVNNTEGDWWLARSLSSGQTGYIPSNYVAPSDS

SEQ ID NO: 272 - protein, 62 aa, Artificial Sequence
  Description of Artificial Sequence:  Synthetic Peptide
TGVTAFVALYDYESRTETDLSFKKGERLQILNNTEGDWWLANSLTTGKSGYIPSNYVAPSDS

SEQ ID NO: 273 - protein, 62 aa, Artificial Sequence
  Description of Artificial Sequence:  Synthetic Peptide
GGVTIFVALYDYEARTTEDLSFKKGERFQIINNTEGDWWEARSIATGKNGYIPSNYVAPADS

SEQ ID NO: 274 - protein, 62 aa, Artificial Sequence
  Description of Artificial Sequence:  Synthetic Peptide
GGVTIFVALYDYEARTTEDLSFKGGERFQIINNTEGDWWEARSIATGKNGYIPSNYVAPADS

SEQ ID NO: 275 - protein, 62 aa, Artificial Sequence
  Description of Artificial Sequence:  Synthetic Peptide
GGVTIFVALYDYEARTTEDLSFKKGERFQIINNTEGDWWEARSIATGKSGYIPSNYVVPADS

SEQ ID NO: 276 - protein, 62 aa, Artificial Sequence
  Description of Artificial Sequence:  Synthetic Peptide
GGGTVFVALYDYEARTTDDLSFKGGERFQIINNTEGDWWEARSIATGKTGYIPSNYVAPADS

SEQ ID NO: 277 - protein, 62 aa, Artificial Sequence
  Description of Artificial Sequence:  Synthetic Peptide
GGGTVFVALYDYEARTTDDLSFKKGERFQIINNTEGDWWEARSIATGKTGYIPSNYVAPADS

SEQ ID NO: 278 - protein, 62 aa, Artificial Sequence
  Description of Artificial Sequence:  Synthetic Peptide
GGVTVFVALYDYEARTTEDLSFRKGERFQIINNTEGDWWEARSIATGKTGYIPSNYVAPADS

SEQ ID NO: 279 - protein, 62 aa, Artificial Sequence
  Description of Artificial Sequence:  Synthetic Peptide
GGVTFFVALYDYEARTSDDLSFRKGDRFQIINNTEGDWWEARSINTGENGYIPSNYVAPADS

SEQ ID NO: 280 - protein, 62 aa, Artificial Sequence
  Description of Artificial Sequence:  Synthetic Peptide
TGVTIFVALYDYEARTGDDLTFTKGEKFHILNNTEYDWWEARSLSSGHRGYVPSNYVAPVDS

SEQ ID NO: 281 - protein, 62 aa, Artificial Sequence
  Description of Artificial Sequence:  Synthetic Peptide
TGVTIFVALYDYEARTGDDLTFTKGEKFHILNNTEYDWWEARSLSSGRTGYVPSNYVAPVDS

SEQ ID NO: 282 - protein, 62 aa, Artificial Sequence
  Description of Artificial Sequence:  Synthetic Peptide
GGVTLFIALYDYEARTEDDLSFQKGEKFHIINNTEGDWWEARSLSSGATGYIPSNYVAPVDS

SEQ ID NO: 283 - protein, 62 aa, Artificial Sequence
  Description of Artificial Sequence:  Synthetic Peptide
AGATLFIALYDYDARTEDDLTFQKGEKFHIINNSEGDWWEARSLSSGNTGYIPSNYVAPMNS

SEQ ID NO: 284 - protein, 62 aa, Artificial Sequence
  Description of Artificial Sequence:  Synthetic Peptide
IGVTLFIALYDYEARTEDDLTFTKGEKFHILNNTEGDWWEARSLSSGKTGCIPSNYVAPVDS

SEQ ID NO: 285 - protein, 62 aa, Artificial Sequence
  Description of Artificial Sequence:  Synthetic Peptide
GGVTLFIALYEYDARTEDDLSFQKGEKFHIINNTEGDWWEARSLDTGKSGYIPSNYVAPVDS

SEQ ID NO: 286 - protein, 62 aa, Artificial Sequence
  Description of Artificial Sequence:  Synthetic Peptide
GGVTMFIALYNYDARTEDDLTFRKGEKFHIINSSEGDWWEARSLTTGSTGYIPSNYVAPVDS

SEQ ID NO: 287 - protein, 62 aa, Artificial Sequence
  Description of Artificial Sequence:  Synthetic Peptide
TGVTLFVALYDYEARTEDDLSFRKGERFQILNSTEGDWWDARSLTTGGSGYIPSNYVAPVDS

SEQ ID NO: 288 - protein, 62 aa, Artificial Sequence
  Description of Artificial Sequence:  Synthetic Peptide
TGVTLFVALYDYEARSEDDLSFRKGEKFQILNSTEGDWWEARSLTTGGTGYIPSNYVAPVDS

SEQ ID NO: 289 - protein, 62 aa, Artificial Sequence
  Description of Artificial Sequence:  Synthetic Peptide
TGVTLFVALYDYEARTEDDLNFQKGEKFQILNSSEGDWWEARSLTTGGTGYIPSNYVAPVDS

SEQ ID NO: 290 - protein, 62 aa, Artificial Sequence
  Description of Artificial Sequence:  Synthetic Peptide
TGVTLFVALYDYEARTEDDLSFQKGEKFQILNSSEGDWWEARSLTTGGTGYIPSNYVAPVDS

SEQ ID NO: 291 - protein, 62 aa, Artificial Sequence
  Description of Artificial Sequence:  Synthetic Peptide
TGVTLFVALYDYEARTEDDLSFHKGEKFQILNSSEGDWWEARSLTTGETGYIPSNYVAPVDS

SEQ ID NO: 292 - protein, 62 aa, Artificial Sequence
  Description of Artificial Sequence:  Synthetic Peptide
TGVTLFEALYDYEARTEDDLSFHKGEKFQILNSSEGDWWEARSLTTGETGYIPSNYVAPVDS

SEQ ID NO: 293 - protein, 62 aa, Artificial Sequence
  Description of Artificial Sequence:  Synthetic Peptide
VGVTLFVALYDYDARTDDDLSFHKGEKFQILNNTEGDWWEARSLQTGGTGYIPSNYVAPVDS

SEQ ID NO: 294 - protein, 62 aa, Artificial Sequence
  Description of Artificial Sequence:  Synthetic Peptide
PGVTIFVALYDYEARISEDLSFKKGERLQIINTADGDWWYARSLITNSEGYIPSTYVAPEKS

SEQ ID NO: 295 - protein, 62 aa, Artificial Sequence
  Description of Artificial Sequence:  Synthetic Peptide
PKGPIYLALFDYDQRTSEDLAFRKGERLEIINNQDGDWWFARSLTTMKEGYIPSNYVAEDKS

SEQ ID NO: 296 - protein, 62 aa, Artificial Sequence
  Description of Artificial Sequence:  Synthetic Peptide
PGALTFIALYKYDARTKEDLSFVKGENLQIISKQDGDWWLARSLRTGKEGYIPSNYIAPNQS

SEQ ID NO: 297 - protein, 62 aa, Artificial Sequence
  Description of Artificial Sequence:  Synthetic Peptide
ANVKIFVALYDYDARTDEDLSFRKGEHLEILNDTQGDWWLARSKKTRSEGYIPSNYVAKLKS

SEQ ID NO: 298 - protein, 62 aa, Artificial Sequence
  Description of Artificial Sequence:  Synthetic Peptide
STAKIFVALYDYDARTDEDLSFRKGEHLEILNDTQGDWWLARSKKTRQEGYIPSNYVAKLKS

SEQ ID NO: 299 - protein, 62 aa, Artificial Sequence
  Description of Artificial Sequence:  Synthetic Peptide
SQSANFVALFQYDARTDDDLSFKKDDILEILNDTQGDWWFARHKATGRTGYIPSNYVAREKS

SEQ ID NO: 300 - protein, 62 aa, Artificial Sequence
  Description of Artificial Sequence:  Synthetic Peptide
NEVLTYIALYDYDARSESDLSFKKGEKLEILNNTDGDWWLAKSMVTGRDGYIPSNYIAPVKS

SEQ ID NO: 301 - protein, 61 aa, Artificial Sequence
  Description of Artificial Sequence:  Synthetic Peptide
AVAHPYTALYDYDARSEDDLDFKKGDILDVTKTEGDWWLARSQKTGKEGYIPSNYVAPVDS

SEQ ID NO: 302 - protein, 63 aa, Artificial Sequence
  Description of Artificial Sequence:  Synthetic Peptide
VKYPIYVGKYDYDSRTDDDLSFKKGDLMYIISTDEGDWWFARSKDTAGKEGYIPSNYVAEYKS

SEQ ID NO: 303 - protein, 62 aa, Artificial Sequence
  Description of Artificial Sequence:  Synthetic Peptide
VKYPIYVGKYDYDSRTDDDLSFKKGDLMYIISTDEGDWWFARSKDTGKEGYIPSNYVAEYKS

SEQ ID NO: 304 - protein, 62 aa, Artificial Sequence
  Description of Artificial Sequence:  Synthetic Peptide
VEHPIYVGKYDYDSRTDDDLGFKKGDLMYIISTEDVDWWFARLKDTRKEGYIPSSYVAEYKS

SEQ ID NO: 305 - protein, 62 aa, Artificial Sequence
  Description of Artificial Sequence:  Synthetic Peptide
PSKPMYVARYTYTARTAEDLSFDKGDKLIILAGLDGDWWMARSTKTNKEGYIPRNYVAPLAS

SEQ ID NO: 306 - protein, 61 aa, Artificial Sequence
  Description of Artificial Sequence:  Synthetic Peptide
EDKHFVVALYDYTAMNDRDLQMLKGEKLQVLKGTGDWWLARSLVTGREGYVPSNFVARVES

SEQ ID NO: 307 - protein, 61 aa, Artificial Sequence
  Description of Artificial Sequence:  Synthetic Peptide
EEERFVVALFDYAAVNDRDLQVLKGEKLQVLRSTGDWWLARSLVTGREGYVPSNFVAPVET

SEQ ID NO: 308 - protein, 61 aa, Artificial Sequence
  Description of Artificial Sequence:  Synthetic Peptide
LQDNLVIALHSYEPSHDGDLGFEKGEQLRILEQSGEWWKAQSLTTGQEGFIPFNFVAKANS

SEQ ID NO: 309 - protein, 61 aa, Artificial Sequence
  Description of Artificial Sequence:  Synthetic Peptide
LQDNLVIALHSYEPSHDGDLGFEKGEHLRILEQNGEWWKAQSLTTGQEGFVPFNFVAKANS

SEQ ID NO: 310 - protein, 61 aa, Artificial Sequence
  Description of Artificial Sequence:  Synthetic Peptide
LQDKLVVALYDYEPTHDGDLGLKQGEKLRVLEESGEWWRAQSLTTGQEGLIPHNFVAMVNS

SEQ ID NO: 311 - protein, 62 aa, Artificial Sequence
  Description of Artificial Sequence:  Synthetic Peptide
LPDNLVVAIYSYEPKHDGDLGFEKGDKLKIISKEDPEWYLAESLTTGQRGYVPYNFVAMSTM

SEQ ID NO: 312 - protein, 61 aa, Artificial Sequence
  Description of Artificial Sequence:  Synthetic Peptide
EQGDIVVALYPYDGIHPDDLSFKKGEKMKVLEEHGEWWKAKSLSSKREGFIPSNYVAKVNT

SEQ ID NO: 313 - protein, 61 aa, Artificial Sequence
  Description of Artificial Sequence:  Synthetic Peptide
EQGDIVVALYPYDGIHPDDLSFKKGEKMKVLEEHGEWWKAKSLLTKKEGFIPSNYVAKLNT

SEQ ID NO: 314 - protein, 61 aa, Artificial Sequence
  Description of Artificial Sequence:  Synthetic Peptide
EQGNIVIALYPYQGIHEDDLSFKKGEKLKVLEEHGEWWKAKSLSTKKEGFIPSNYVARVNT

SEQ ID NO: 315 - protein, 61 aa, Artificial Sequence
  Description of Artificial Sequence:  Synthetic Peptide
SEDTIVVALYDYEAIHREDLSFQKGDQMVVLEEAGEWWKARSLATKKEGYIPSNYVARVNS

SEQ ID NO: 316 - protein, 61 aa, Artificial Sequence
  Description of Artificial Sequence:  Synthetic Peptide
SEDTIVVALYDYEAIHREDLSFQKGDQMVVLEESGEWWKARSLATKKEGYIPSNYVARVNS

SEQ ID NO: 317 - protein, 61 aa, Artificial Sequence
  Description of Artificial Sequence:  Synthetic Peptide
SEDIIVVALYDYEAIHHEDLSFQKGDQMVVLEESGEWWKARSLATRKEGYIPSNYVARVDS

SEQ ID NO: 318 - protein, 61 aa, Artificial Sequence
  Description of Artificial Sequence:  Synthetic Peptide
GPESIAIALYDYEGINEGDLGFKKGDKLKILQESGEWWRAQSISTGQEGFIPSNYVAIDSL

SEQ ID NO: 319 - protein, 62 aa, Artificial Sequence
  Description of Artificial Sequence:  Synthetic Peptide
NTRRIVVALYNYNAREETDVSFVKGDRMEVLDDTESDWWRVVHLKTRQEGLIPWNFVAEDRS

SEQ ID NO: 320 - protein, 62 aa, Artificial Sequence
  Description of Artificial Sequence:  Synthetic Peptide
VLKRVVVALYDYKSRDESDLSFMKGDRMEVIDDTESDWWRVVNLTTRQEGLIPLNFVAEERS

SEQ ID NO: 321 - protein, 62 aa, Artificial Sequence
  Description of Artificial Sequence:  Synthetic Peptide
QERETLVALYPYDSRADGDLSFQKGDAMYLLDHSNCDWWYVRHQRTGQTGYVPRNFVAKQQT

SEQ ID NO: 322 - protein, 61 aa, Artificial Sequence
  Description of Artificial Sequence:  Synthetic Peptide
RHKVTAVALGSFPAGEQARLSLRLGEPLTIISEDGDWWTVQSEVSGREYHMPSVYVAKVAH

SEQ ID NO: 323 - protein, 61 aa, Artificial Sequence
  Description of Artificial Sequence:  Synthetic Peptide
RSKATAVALGSFPAGGPAELSLRLGEPLTIVSEDGDWWTVLSEVSGREYNIPSVHVAKVSH

SEQ ID NO: 324 - protein, 61 aa, Artificial Sequence
  Description of Artificial Sequence:  Synthetic Peptide
ADKCIFVALYNFPLSGQTDLSIHFGEQLNILSEDGDWLKVSSASTGQECYLPTNYVAKVCN

SEQ ID NO: 325 - protein, 62 aa, Artificial Sequence
  Description of Artificial Sequence:  Synthetic Peptide
RCGDTVFAVYSYVAETDEAINLVEGERLYILDTSNQDWWYVQKHLTEEKGWVPAQYLMDENN

SEQ ID NO: 326 - protein, 62 aa, Artificial Sequence
  Description of Artificial Sequence:  Synthetic Peptide
PEEKMLIVENRFLAQTPKEMSVEEGDVLYLIEQSNREWWYVASKSRQFKGFVPKSHVVYAEY

SEQ ID NO: 327 - protein, 62 aa, Artificial Sequence
  Description of Artificial Sequence:  Synthetic Peptide
PGSYMVKAKYKYAASGDTDISFEEKEIMYVLEQFDEFWLKVVKQKDNKEGLVPSNYVSKQDG

SEQ ID NO: 328 - protein, 70 aa, Artificial Sequence
  Description of Artificial Sequence:  Synthetic Peptide
PVAFAVRTNVSFDASLDDDSPVHGYAISFTCKDFLHILEKFSNDWWIGRAVKEGCDVGFIPSPAKLENLK

SEQ ID NO: 329 - protein, 70 aa, Artificial Sequence
  Description of Artificial Sequence:  Synthetic Peptide
PVAFAVRTNVSYDGSLDDDSPVHGSAVSFEVGDFLHIKEKYDNNWWIGRLVKEGCEVGFIPSPVKLEHIR

SEQ ID NO: 330 - protein, 70 aa, Artificial Sequence
  Description of Artificial Sequence:  Synthetic Peptide
PVAFAVRTNVGYNPSPGDEVPVQGVAITFEPKDFLHIKEKYNNDWWIGRLVKEGCEVGFIPSPVKLDSLR

SEQ ID NO: 331 - protein, 70 aa, Artificial Sequence
  Description of Artificial Sequence:  Synthetic Peptide
PVAFAVRTNVGYNPSPGDEVPVEGVAITFEPKDFLHIKEKYNNDWWIGRLVKEGCEVGFIPSPVKLDSLR

SEQ ID NO: 332 - protein, 70 aa, Artificial Sequence
  Description of Artificial Sequence:  Synthetic Peptide
PVAFAVRTNVSYSAAHEDDVPVPGMAISFEAKDFLHVKEKFNNDWWIGRLVKEGCEIGFIPSPVKLENMR

SEQ ID NO: 333 - protein, 70 aa, Artificial Sequence
  Description of Artificial Sequence:  Synthetic Peptide
PVAFAVRTNVSYSAAHEDDVPVPDMAISFEAKDFLHVKEKFNNDWWIGRLVKEGCEIGFIPSPVKLENMR

SEQ ID NO: 334 - protein, 70 aa, Artificial Sequence
  Description of Artificial Sequence:  Synthetic Peptide
PVAFAVRTNVRYSAAQEDDVPVPGMAISFEAKDFLHVKEKFNNDWWIGRLVKEGCEIGFIPSPVKLENMR

SEQ ID NO: 335 - protein, 70 aa, Artificial Sequence
  Description of Artificial Sequence:  Synthetic Peptide
PVAFAVKTNVSYCGALDEDVPVPSTAISFDAKDFLHIKEKYNNDWWIGRLVKEGCEIGFIPSPLRLENIR

SEQ ID NO: 336 - protein, 70 aa, Artificial Sequence
  Description of Artificial Sequence:  Synthetic Peptide
PVAFAMRANYGYNGAEDDDSPIHGMALSFEPKDFLHIKEKFNNDWLIGRVVREGCDIGFIPSPSKLESLR

SEQ ID NO: 337 - protein, 70 aa, Artificial Sequence
  Description of Artificial Sequence:  Synthetic Peptide
HVAFAVQAMRDYDGSLDEKSPLKDHTISFNTNDFIHIHTKFNSDWWIGRIVRSHSEFGFVPTARRLANYM

SEQ ID NO: 338 - protein, 71 aa, Artificial Sequence
  Description of Artificial Sequence:  Synthetic Peptide
KRSLYVRALFDYDPNRDDGLPSRGLPFKHGDILHVTNASDDEWWQARRVLGDNEDEQIGIVPSKRRWERKM

SEQ ID NO: 339 - protein, 71 aa, Artificial Sequence
  Description of Artificial Sequence:  Synthetic Peptide
KRTLYVRALFDYDPNRDDGLPTRGLQFRHGDILHVTNASDDEWWQARRVIGEDEEESIGIVPSKRRWERKQ

SEQ ID NO: 340 - protein, 71 aa, Artificial Sequence
  Description of Artificial Sequence:  Synthetic Peptide
KRSLYVRALFDYDRTRDSCLPSQGLSFSYGDILHVINASDDEWWQARLVTPHGESEQIGVIPSKKRVEKKE

SEQ ID NO: 341 - protein, 72 aa, Artificial Sequence
  Description of Artificial Sequence:  Synthetic Peptide
RKSEYVRALFDYDPSRENSVAPHRSMGFNYGDILHIINSSDDEWWTARKVHENGEETAEGVIPSKKRVEKRE

SEQ ID NO: 342 - protein, 62 aa, Artificial Sequence
  Description of Artificial Sequence:  Synthetic Peptide
NFIYKAKALYPYDADDDDAYEISFEQNEILQVSDIEGRWWKARRANGETGIIPSNYVQLIDG

SEQ ID NO: 343 - protein, 62 aa, Artificial Sequence
  Description of Artificial Sequence:  Synthetic Peptide
SFPYTAEALYTYQADQTDAYEISFEQGEILRVGDIEGRWWKAKKSNGETGIIPSNYVKLLDG

SEQ ID NO: 344 - protein, 62 aa, Artificial Sequence
  Description of Artificial Sequence:  Synthetic Peptide
TFRYKAKALYSYDANPDDINEISFVKDEILEVDDIDGKWWQARRANGQVGICPSNYVKLLDT

SEQ ID NO: 345 - protein, 61 aa, Artificial Sequence
  Description of Artificial Sequence:  Synthetic Peptide
EFPYTARALYNYQKSPDDENEISFEKDEILKVNDIHSRWWQAKRANGEIGICPSNYVELIE

SEQ ID NO: 346 - protein, 60 aa, Artificial Sequence
  Description of Artificial Sequence:  Synthetic Peptide
EYPYRAKAIFSYEANPDDANEISFSKHEVLEISDVSGRWWQARKENGETGIAPSNYLILL

SEQ ID NO: 347 - protein, 63 aa, Artificial Sequence
  Description of Artificial Sequence:  Synthetic Peptide
EDRRRVRAILPYTKVPDTDEISFLKGDMFIVHNELEDGWMWVTNLRTDEQGLIVEDLVEEVGR

SEQ ID NO: 348 - protein, 64 aa, Artificial Sequence
  Description of Artificial Sequence:  Synthetic Peptide
PVLKKVRAIYDYEQVQNADEELTFHENDVFDVFDDKDADWLLVKSTVSNEFGFIPGNYVEPENG

SEQ ID NO: 349 - protein, 64 aa, Artificial Sequence
  Description of Artificial Sequence:  Synthetic Peptide
PPKKVIKALYDYEAQNAQELSFSRGDFFHVIGRENDPEWYEACNPALPDARGLVPVAYFQALGR

SEQ ID NO: 350 - protein, 63 aa, Artificial Sequence
  Description of Artificial Sequence:  Synthetic Peptide
PPRKVIRALYDYTARKATEVSFAKGDFFHVIGRENDKAWYEVCNPAAGTRGFVPVSHFEEIGK

SEQ ID NO: 351 - protein, 63 aa, Artificial Sequence
  Description of Artificial Sequence:  Synthetic Peptide
PPKMVIRALYDYEPQGPGELSFCKGDFFHVISNEQDSEWFEAFNPLRNVRGMVPVPYFEVLGK

SEQ ID NO: 352 - protein, 61 aa, Artificial Sequence
  Description of Artificial Sequence:  Synthetic Peptide
SPEKVIKAKYSYQAQTSKELSFMEGEFFYVSGDEKDWYKASNPSTGKEGVVPKTYFEVFDR

SEQ ID NO: 353 - protein, 68 aa, Artificial Sequence
  Description of Artificial Sequence:  Synthetic Peptide
GFLGVYRAIYDYTPQGEGELTISEGDILYVLEKSQEDDWWKAKKKANAADDDEPVGLIPNNYIEEAKP

SEQ ID NO: 354 - protein, 68 aa, Artificial Sequence
  Description of Artificial Sequence:  Synthetic Peptide
VFLGIYRAVYAYEPQTPEELAIQEDDLLYLLQKSDIDDWWTVKKRVIGSDSEEPVGLVPSTYIEEAPV

SEQ ID NO: 355 - protein, 77 aa, Artificial Sequence
  Description of Artificial Sequence:  Synthetic Peptide
PIIGIYKVLYSYEPQEINPGEEIPENEREISIVEDEIVCLLEKGEDDWYLVKRNVNSNDDDEEIGIVPSNYITEAEP

SEQ ID NO: 356 - protein, 61 aa, Artificial Sequence
  Description of Artificial Sequence:  Synthetic Peptide
SGTRKARVLYDYEAADSSELALLADELITVYSLPGMDPDWLIGERGNKKGKVPVTYLELLS

SEQ ID NO: 357 - protein, 61 aa, Artificial Sequence
  Description of Artificial Sequence:  Synthetic Peptide
TGTRKAKVLYDYDAADTSELSLLADELITVYTVPGMDPDWLIGERGNQKGKVPVTYLELLS

SEQ ID NO: 358 - protein, 61 aa, Artificial Sequence
  Description of Artificial Sequence:  Synthetic Peptide
SGSRKARVLYDYDAANSTELSLLADEVITVFSVVGMDSDWLMGERGNQKGKVPITYLELLN

SEQ ID NO: 359 - protein, 62 aa, Artificial Sequence
  Description of Artificial Sequence:  Synthetic Peptide
LHAGGYIVIHEYSPSNGSSLVLGEKVRVVDNGDPDWLHGFRLNDRTEHMISFPATCVAQMMA

SEQ ID NO: 360 - protein, 61 aa, Artificial Sequence
  Description of Artificial Sequence:  Synthetic Peptide
EVVPYAVALYDFDGIEPGDLSFREGEKIYLLDHPTPEWLRGRTRSGCEGIFPINYVDIKVP

SEQ ID NO: 361 - protein, 61 aa, Artificial Sequence
  Description of Artificial Sequence:  Synthetic Peptide
AEDPYGIALYDFQGEADEDLSFKANEKIYLLKRLTEEWYMGRDKRGLEGMFPVNYVEVKVP

SEQ ID NO: 362 - protein, 62 aa, Artificial Sequence
  Description of Artificial Sequence:  Synthetic Peptide
EARPRVKALYKFDEETDEDLGLSPGEMCIYLKPLDENWYRGESASTGNRGMFPATFVEVIKP

SEQ ID NO: 363 - protein, 63 aa, Artificial Sequence
  Description of Artificial Sequence:  Synthetic Peptide
LPMPQCIAMYDFKMGPNDEEGCLEFKKSTVIQVMRRVDHNWAEGRIGQTIGIFPIAFVELNAA

SEQ ID NO: 364 - protein, 63 aa, Artificial Sequence
  Description of Artificial Sequence:  Synthetic Peptide
LPFPQCKALYDFRMGPTEEEGCLTFKKGALIHVLRRVDQNWAEGRIGDKIGIFPISFVEMNGL

SEQ ID NO: 365 - protein, 64 aa, Artificial Sequence
  Description of Artificial Sequence:  Synthetic Peptide
QPPPQCKALYDFEVKDKEADKDCLPFAKDDVLTVIRRVDENWAEGMLADKIGIFPISYVEFNSA

SEQ ID NO: 366 - protein, 66 aa, Artificial Sequence
  Description of Artificial Sequence:  Synthetic Peptide
QPPPLCRALYNFDLRDKDKSENQDCLTFLKDDVITVISRVDENWAEGKLGDKVGIFPILFVEPNVS

SEQ ID NO: 367 - protein, 66 aa, Artificial Sequence
  Description of Artificial Sequence:  Synthetic Peptide
QPPPLCRALYNFDLRGKDKSENQDCLTFLKDDIITVISRVDENWAEGKLGDKVGIFPILFVEPNLT

SEQ ID NO: 368 - protein, 62 aa, Artificial Sequence
  Description of Artificial Sequence:  Synthetic Peptide
GEIGEAIAKYNFNADTNVELSLRKGDRVILLKRVDQNWYEGKIPGTNRQGIFPVSYVEVVKK

SEQ ID NO: 369 - protein, 62 aa, Artificial Sequence
  Description of Artificial Sequence:  Synthetic Peptide
GEIGEAIAKYNFNADTNVELSLRKGDRIILLKRVDQNWYEGKIPGTNRQGIFPVSYVEVVKR

SEQ ID NO: 370 - protein, 62 aa, Artificial Sequence
  Description of Artificial Sequence:  Synthetic Peptide
LEYGEAIAKFNFNGDTQVEMSFRKGERITLLRQVDENWYEGRIPGTSRQGIFPITYVDVLKR

SEQ ID NO: 371 - protein, 62 aa, Artificial Sequence
  Description of Artificial Sequence:  Synthetic Peptide
LEYGEAIAKFNFNGDTQVEMSFRKGERITLLRQVDENWYEGRIPGTSRQGIFPITYVDVIKR

SEQ ID NO: 372 - protein, 62 aa, Artificial Sequence
  Description of Artificial Sequence:  Synthetic Peptide
LEYGEAVAQYTFKGDLEVELSFRKGEHICLIRKVNENWYEGRITGTGRQGIFPASYVQVSRE

SEQ ID NO: 373 - protein, 62 aa, Artificial Sequence
  Description of Artificial Sequence:  Synthetic Peptide
MTSYVRAMYDFTGEPGSSELSIATGDVLSVTRSDVGEGWWEGKNARGQIGLFPAAYVEVMSA

SEQ ID NO: 374 - protein, 60 aa, Artificial Sequence
  Description of Artificial Sequence:  Synthetic Peptide
TRVKVLYDFNGEPNSSEISISVDEVLTVTNTDVGEGWWEGMNSRGQRGLFPAAYVETIPE

SEQ ID NO: 375 - protein, 61 aa, Artificial Sequence
  Description of Artificial Sequence:  Synthetic Peptide
MAQVKAEYDFQSQPNTGELSISAGEVLTVIRENIDGGWIEGRNVRGSVGLFPESYVTPYQA

SEQ ID NO: 376 - protein, 61 aa, Artificial Sequence
  Description of Artificial Sequence:  Synthetic Peptide
MALKGRALYYFHSENKEEISIQQDEELVIFSETSLDGWLQGQNSRGETGLFPASYVEIVRP

SEQ ID NO: 377 - protein, 61 aa, Artificial Sequence
  Description of Artificial Sequence:  Synthetic Peptide
MALKGRALYDFHSENKEEISIQQDEELVIFSETSLDGWLQGQNSRGETGLFPASYVEIVRP

SEQ ID NO: 378 - protein, 61 aa, Artificial Sequence
  Description of Artificial Sequence:  Synthetic Peptide
MALKGRALYDFHSENKEEISIQQDEDLVIFSETSLDGWLQGQNSRGETGLFPASYVEIVRS

SEQ ID NO: 379 - protein, 61 aa, Artificial Sequence
  Description of Artificial Sequence:  Synthetic Peptide
MALRARALYDFKSENPGEISLREHEVLSLCSEQDIEGWLEGINSRGDRGLFPASYVQVIRA

SEQ ID NO: 380 - protein, 61 aa, Artificial Sequence
  Description of Artificial Sequence:  Synthetic Peptide
MALRARALYDFRSENPGEISLREHEVLSLCSEQDIEGWLEGVNSRGDRGLFPASYVQVIRA

SEQ ID NO: 381 - protein, 61 aa, Artificial Sequence
  Description of Artificial Sequence:  Synthetic Peptide
GDSQKMRAIYPFTARSDTELSLKRGEIITRRRQIDSNWLEGSNQIGIVGIFPASYVEPIEQ

SEQ ID NO: 382 - protein, 62 aa, Artificial Sequence
  Description of Artificial Sequence:  Synthetic Peptide
ATGVRVRALYDYAGQEADELSFRAGEELLKMSEEDEQGWCQGQLQSGRIGLYPANYVECVGA

SEQ ID NO: 383 - protein, 64 aa, Artificial Sequence
  Description of Artificial Sequence:  Synthetic Peptide
PIFAYVRALYAYKATLPSEIDLNVDDTLVVLNRQKDGWWKGLVVSPTVGRIGLFPSNYIEELEY

SEQ ID NO: 384 - protein, 60 aa, Artificial Sequence
  Description of Artificial Sequence:  Synthetic Peptide
SKGVRVRALYDYDGQEQDELSFKAGDELTKLGEEDEQGWCRGRLDSGQLGLYPANYVEAI

SEQ ID NO: 385 - protein, 61 aa, Artificial Sequence
  Description of Artificial Sequence:  Synthetic Peptide
GTEVRVRALYDYEGQEHDELSFKAGDELTKIEDEDEQGWCKGRLDSGQVGLYPANYVEAIQ

SEQ ID NO: 386 - protein, 61 aa, Artificial Sequence
  Description of Artificial Sequence:  Synthetic Peptide
GTEVRVRALYDYEGQEHDELSFKAGDELTKMEDEDEQGWCKGRLDNGQVGLYPANYVEAIQ

SEQ ID NO: 387 - protein, 61 aa, Artificial Sequence
  Description of Artificial Sequence:  Synthetic Peptide
VMEVRVRALYDYEGQEQDELSFKAGDELTKMENEDEQGWCKGRLDNGQVGLYPANYVEPIQ

SEQ ID NO: 388 - protein, 61 aa, Artificial Sequence
  Description of Artificial Sequence:  Synthetic Peptide
TLEVRVRALYDYDGQELDELSFKAGEELTKIEDEDEQGWCKGRLEGGQVGLYPANYVESVQ

SEQ ID NO: 389 - protein, 61 aa, Artificial Sequence
  Description of Artificial Sequence:  Synthetic Peptide
EPGVPVKALYDYEGAESDELTFKQGDLFEKLEDEDEQGWCKGRKDGRVGLYPANYVEVVAT

SEQ ID NO: 390 - protein, 59 aa, Artificial Sequence
  Description of Artificial Sequence:  Synthetic Peptide
EPGVPVKALYDYEGAESDELTFKQGDVFEKLEDEDEQGWCKGRMNGRVGLYPANYVETA

SEQ ID NO: 391 - protein, 61 aa, Artificial Sequence
  Description of Artificial Sequence:  Synthetic Peptide
TTSKPAVVLYDYAPAEGDEIALRKGEMIEVLTEPDSLGWCTGRVSGNVGLFPASYVQCQGE

SEQ ID NO: 392 - protein, 77 aa, Artificial Sequence
  Description of Artificial Sequence:  Synthetic Peptide
AEGFQYRAVYPFRRERPEDLELLPGDLLVVSRVALQALGVADGGERCPHNVGWMPGFNERTRQRGDFPGTYVEFLGP

SEQ ID NO: 393 - protein, 77 aa, Artificial Sequence
  Description of Artificial Sequence:  Synthetic Peptide
PEGFQYRALYPFRRERPEDLELLPGDVLVVSRAALQALGVAEGGERCPQSVGWMPGLNERTRQRGDFPGTYVEFLGP

SEQ ID NO: 394 - protein, 77 aa, Artificial Sequence
  Description of Artificial Sequence:  Synthetic Peptide
PEGFQYRALYPFRRERPEDLELLPGDVLVVSRAALQALGVAEGNERCPQSVGWMPGLNERTRQRGDFPGTYVEFLGP

SEQ ID NO: 395 - protein, 78 aa, Artificial Sequence
  Description of Artificial Sequence:  Synthetic Peptide
AEGYKYRALYPYKKEREEDIDLRVGDTLSVSRATLLALGCFAEGMEARPEQIGWLNGCNENTGQRGDFPGTYVEYLGR

SEQ ID NO: 396 - protein, 77 aa, Artificial Sequence
  Description of Artificial Sequence:  Synthetic Peptide
ADGFQYRSIYSYRKDWEHDIDLEPGDVLTVDKGSLLSLGIKEGDEQHPECIGWILGFNERTKQRGDFPGTYVQYVGP

SEQ ID NO: 397 - protein, 60 aa, Artificial Sequence
  Description of Artificial Sequence:  Synthetic Peptide
GSELQARALYDYESAEPSDLNLKAGDIISVIQQDDGSGWTKGRNYEGNEGIFPSTYIEYV

SEQ ID NO: 398 - protein, 63 aa, Artificial Sequence
  Description of Artificial Sequence:  Synthetic Peptide
SNGEIVRALYDYNATEENEISFKANALIKVVLRDESGWWQGMVIGESDRIGVFPSNFISDSSD

SEQ ID NO: 399 - protein, 61 aa, Artificial Sequence
  Description of Artificial Sequence:  Synthetic Peptide
SPATRATAVYDYEASQPDELGFKTGDVIIVTDKSEAEWWSGHREQDPSKSGLFPSNYVQQQ

SEQ ID NO: 400 - protein, 62 aa, Artificial Sequence
  Description of Artificial Sequence:  Synthetic Peptide
PILGYVIALYDYQAQIPEEISFQKGDTLMVLRTQEDGWWDGEIINVPNSKRGLFPSNFVQTV

SEQ ID NO: 401 - protein, 64 aa, Artificial Sequence
  Description of Artificial Sequence:  Synthetic Peptide
RILGYVSALYDYDAAIPEEISFRKGDTIAVLKLYEDGWWEGFVVGEDDHNRGQFPSNFVREIEV

SEQ ID NO: 402 - protein, 61 aa, Artificial Sequence
  Description of Artificial Sequence:  Synthetic Peptide
VILHFAKAMYMYQAAIAEELGFAKGDILAVLRHQDDGWWEATVHGGNGQVGLVPSNYLQVL

SEQ ID NO: 403 - protein, 69 aa, Artificial Sequence
  Description of Artificial Sequence:  Synthetic Peptide
TRVVRVKGLYDYDATCDTELSFREGDILTVTEQDSSGWWYAELAQSANPSASIGSLGFIPANFVDIIDG

SEQ ID NO: 404 - protein, 62 aa, Artificial Sequence
  Description of Artificial Sequence:  Synthetic Peptide
SGYLQAKALYDYNGENDGDLSFREGDIITILDQSDPDGWWQGSLPTGEQGFFPSNFVQQLIG

SEQ ID NO: 405 - protein, 63 aa, Artificial Sequence
  Description of Artificial Sequence:  Synthetic Peptide
YKNLMARALYDNVPECAEELAFRKGDILTVIEQNTGGLEGWWLCSLHGRQGIVPGNRVKLLIG

SEQ ID NO: 406 - protein, 63 aa, Artificial Sequence
  Description of Artificial Sequence:  Synthetic Peptide
YKNLMARALYDNVPECAEELAFRKGDILTVIEQNTEGLEGWWLCSLHGRQGIVPGNRVKLLIG

SEQ ID NO: 407 - protein, 64 aa, Artificial Sequence
  Description of Artificial Sequence:  Synthetic Peptide
TSTQLARALYDNTAESPQELSFRRGDVLRVLQREGAGGLDGWCLCSLHGQQGIVPANRVKLLPA

SEQ ID NO: 408 - protein, 63 aa, Artificial Sequence
  Description of Artificial Sequence:  Synthetic Peptide
PKALLARALYDNCPDCSDELAFSRGDILTILEQHVPESEGWWKCLLHGRQGLAPANRLQILTE

SEQ ID NO: 409 - protein, 60 aa, Artificial Sequence
  Description of Artificial Sequence:  Synthetic Peptide
DLGQRARALYDYQAADETEITFDPGDVITHIDQIDEGWWQGLGPDGTYGLFPANYVEIIN

SEQ ID NO: 410 - protein, 59 aa, Artificial Sequence
  Description of Artificial Sequence:  Synthetic Peptide
DNMIRARALYDYQAADDSEISFDPDDIITHIDQIDEGWWQGLAPDGTYGLFPANYVELI

SEQ ID NO: 411 - protein, 60 aa, Artificial Sequence
  Description of Artificial Sequence:  Synthetic Peptide
GQGLCARALYDYQAADDTEISFDPENLITGIEVIDEGWWRGYGPDGHFGMFPANYVELIE

SEQ ID NO: 412 - protein, 60 aa, Artificial Sequence
  Description of Artificial Sequence:  Synthetic Peptide
EKGVCARALYDYQAADDTEISFDPDDLITQIQFIDEGWWRGFSPAGHFGMFPANYVELLE

SEQ ID NO: 413 - protein, 59 aa, Artificial Sequence
  Description of Artificial Sequence:  Synthetic Peptide
VAEQNAMALWDYQAADDTEISFDPDDIITDIDQVDSGWWKGRAPSGRVGLFPANYVKLI

SEQ ID NO: 414 - protein, 61 aa, Artificial Sequence
  Description of Artificial Sequence:  Synthetic Peptide
AQPTDMRALQDFEEPDKLHIQMNDVITVIEGRAENYWWRGQNTRTLCVGPFPRNVVTSVAG

SEQ ID NO: 415 - protein, 72 aa, Artificial Sequence
  Description of Artificial Sequence:  Synthetic Peptide
INTPAVGAAYGVRRYVAQACDEISIEVGDMISVIDMPSPAESIWWRGKKSHLQKNQYEVGFFPQSCVATIGD

SEQ ID NO: 416 - protein, 72 aa, Artificial Sequence
  Description of Artificial Sequence:  Synthetic Peptide
INTPAVGAAYGVRRYQAQAPDEINIEVGDMISVIDMPSPAESIWWRGKKSHLQKSLYEVGFFPQSCVATIGD

SEQ ID NO: 417 - protein, 62 aa, Artificial Sequence
  Description of Artificial Sequence:  Synthetic Peptide
PQAQIYVATYAYSSKQDDELSFVVGDLIELISDVEDGWSKGKLKSTGAVGMFPTNFVTLKPT

SEQ ID NO: 418 - protein, 62 aa, Artificial Sequence
  Description of Artificial Sequence:  Synthetic Peptide
ENNICAIVEYEYAAKEPDELDLQKGAIIHRIKQMPGGWWQGTLKASGVTGMFPDNFVRVLES

SEQ ID NO: 419 - protein, 60 aa, Artificial Sequence
  Description of Artificial Sequence:  Synthetic Peptide
SVSAVVEFDYTAKEPDELTLKKGAIITNIKVQDGGWWEGTLVATGRTGVFPDNFVRVLES

SEQ ID NO: 420 - protein, 62 aa, Artificial Sequence
  Description of Artificial Sequence:  Synthetic Peptide
GSKTKAKVVYDFESKEPNELNLKKGDIIVVLAKDSSGWWQGINQSTQATGWFSNTFVEEIKE

SEQ ID NO: 421 - protein, 60 aa, Artificial Sequence
  Description of Artificial Sequence:  Synthetic Peptide
PPPQQYIALYEYDAMQPDELTFKENDVINLIKKVDADWWQGELVRTKQIGMLPSNYVQQI

SEQ ID NO: 422 - protein, 65 aa, Artificial Sequence
  Description of Artificial Sequence:  Synthetic Peptide
KKPEIAQVIASYAATAPEQLTLAPGQLILIRKKNPGGWWEGELQARGKKRQIGWFPANYVKLLSP

SEQ ID NO: 423 - protein, 66 aa, Artificial Sequence
  Description of Artificial Sequence:  Synthetic Peptide
SQCKVFKAVHDYDAPSPNNEGKFLSFKTGDIVVLLDTVGEDRGWWKGQVNNKSGFFPLSYVKPYDP

SEQ ID NO: 424 - protein, 60 aa, Artificial Sequence
  Description of Artificial Sequence:  Synthetic Peptide
TAGKIFRAMYDYMAADADEVSFKDGDAIINVQAIDEGWMYGTVQRTGRTGMLPANYVEAI

SEQ ID NO: 425 - protein, 60 aa, Artificial Sequence
  Description of Artificial Sequence:  Synthetic Peptide
TAGKIFRAMYDYMAADADEVSFKDGDAIVNVQAIDEGWMYGTVQRTGRTGMLPANYVEAI

SEQ ID NO: 426 - protein, 60 aa, Artificial Sequence
  Description of Artificial Sequence:  Synthetic Peptide
TAGKIFRAIYDYIAADADEVSFKDGDAIVNAQAIDEGWMYGTVQRTGRTGMLPANYVEAI

SEQ ID NO: 427 - protein, 60 aa, Artificial Sequence
  Description of Artificial Sequence:  Synthetic Peptide
TAGKTYRAMYDYTAADADEVSFKDGDTIVNVQAIDEGWMYGTVQRTGKTGMLPANYVEAV

SEQ ID NO: 428 - protein, 60 aa, Artificial Sequence
  Description of Artificial Sequence:  Synthetic Peptide
GGGKRYRAVYDYSAADEDEVSFQDGDTIVNVQQIDDGWMYGTVERTGDTGMLPANYVEAI

SEQ ID NO: 429 - protein, 60 aa, Artificial Sequence
  Description of Artificial Sequence:  Synthetic Peptide
GGGKRYRAVFDYSAADEDEVSFQDGDTIVNVQQIDDGWMYGTVERTGDTGMLPANYVEAI

SEQ ID NO: 430 - protein, 60 aa, Artificial Sequence
  Description of Artificial Sequence:  Synthetic Peptide
AGGKRYRAVYDYNAADEDEVSFQDGDTIVNVQQIDDGWMYGTVERTGDTGMLPANYVEAI

SEQ ID NO: 431 - protein, 60 aa, Artificial Sequence
  Description of Artificial Sequence:  Synthetic Peptide
SSGKRYRAVYDYTAADEDEVSFMDGDMIVDVQQIDEGWMYGRVERTGQQGMLPANYVEAM

SEQ ID NO: 432 - protein, 61 aa, Artificial Sequence
  Description of Artificial Sequence:  Synthetic Peptide
PNLRTYRAMYDYSAQDEDEVSFRDGDYIVNVQPIDDGWMYGTVQRTGRTGMLPANYIEFVN

SEQ ID NO: 433 - protein, 62 aa, Artificial Sequence
  Description of Artificial Sequence:  Synthetic Peptide
SKVRVYRALYDYEAQDSDEVGFSEGDLIIEVNSIDAGWMTGRVERTGLTGMLPANYVELMKI

SEQ ID NO: 434 - protein, 62 aa, Artificial Sequence
  Description of Artificial Sequence:  Synthetic Peptide
TAMRVYRAIYDYEAQDVDEVSFREGDVIFEVESIDSGWMTGRVERTGKTGMLPANYVEQAVI

SEQ ID NO: 435 - protein, 62 aa, Artificial Sequence
  Description of Artificial Sequence:  Synthetic Peptide
KAGFAVKAIYDYAAADKDEISFLEGDIIVNCEKIDDGWMTGTVQRTLQWGMLPANYVQPHKL

SEQ ID NO: 436 - protein, 65 aa, Artificial Sequence
  Description of Artificial Sequence:  Synthetic Peptide
KHLDTVIALYDFPGTQSSHLPLNLGDTIHVLSKSATGWWDGVVMGNSGELQRGWFPHNYVRSVNY

SEQ ID NO: 437 - protein, 62 aa, Artificial Sequence
  Description of Artificial Sequence:  Synthetic Peptide
MSGARCRTLYPFSGERHGQGLRFAAGELITLLQVPDGGWWEGEKEDGLRGWFPASYVQLLEK

SEQ ID NO: 438 - protein, 61 aa, Artificial Sequence
  Description of Artificial Sequence:  Synthetic Peptide
GFGGTFVAQYSYEAKEDDEVTFKSGDVIVNGEPISEGWMYGTVQRTGKFGMLPSNYVKLYR

SEQ ID NO: 439 - protein, 63 aa, Artificial Sequence
  Description of Artificial Sequence:  Synthetic Peptide
PKEPMFEAAYDFPGSGSPSELPLKKGDVIYITREEPSGWSLGKLLDGSKEGWVPTAYMKPHSG

SEQ ID NO: 440 - protein, 63 aa, Artificial Sequence
  Description of Artificial Sequence:  Synthetic Peptide
PKDPKFEAAYDFPGSGSSSELPLKKGDIVFISRDEPSGWSLAKLLDGSKEGWVPTAYMTPYKD

SEQ ID NO: 441 - protein, 59 aa, Artificial Sequence
  Description of Artificial Sequence:  Synthetic Peptide
EEYKQVEVVYDYDGGGDAQRLVLVKGAIITVIKEYEGWAYGSTDDGQVGLYPINYTRPI

SEQ ID NO: 442 - protein, 62 aa, Artificial Sequence
  Description of Artificial Sequence:  Synthetic Peptide
WERPTVKALYAYLSSGENQLSFLEGDRIALVGDRAKGWQFGENLRTQKFGWFPIAYTETERD

SEQ ID NO: 443 - protein, 59 aa, Artificial Sequence
  Description of Artificial Sequence:  Synthetic Peptide
PSRPTAKALYDYDASSTDELSFKEGDIIFIVQKDNGGWTQGELKSGQKGWAPTNYLQYN

SEQ ID NO: 444 - protein, 72 aa, Artificial Sequence
  Description of Artificial Sequence:  Synthetic Peptide
QPIDVVECTYQYFTKSRNKLSLRVGDLIYVLTKGSNGWWDGVLIRHSANNNNNSLILDRGWFPPSFTRSILN

SEQ ID NO: 445 - protein, 72 aa, Artificial Sequence
  Description of Artificial Sequence:  Synthetic Peptide
KRSKFVVALQDNPSPAADDSTFLSFLKGDLIVLDQDTGEQVMTSGWAHGTNDRTKQRGDFPADCVYVLPTVV

SEQ ID NO: 446 - protein, 72 aa, Artificial Sequence
  Description of Artificial Sequence:  Synthetic Peptide
KRSKYVVALQDNPNPAGEESGFLSFAKGDLIILDHDTGEQVMNSGWANGINERTKQRGDFPTDCVYVMPTVT

SEQ ID NO: 447 - protein, 72 aa, Artificial Sequence
  Description of Artificial Sequence:  Synthetic Peptide
KRSKYVIALQDYRAPSDGTSFLSFFKGDLIILEDESCGESVLNNGWCIGRCDRSQERGDFPAETVYVLPTLS

SEQ ID NO: 448 - protein, 60 aa, Artificial Sequence
  Description of Artificial Sequence:  Synthetic Peptide
MRFQTTAISDYENSSNPSFLKFSAGDTIIVIEVLEDGWCDGICSEKRGWFPTSCIDSSKI

SEQ ID NO: 449 - protein, 65 aa, Artificial Sequence
  Description of Artificial Sequence:  Synthetic Peptide
KRSEIAQVIAPYEATSTEQLSLTRGQLIMIRKKTDSGWWEGELQAKGRRRQIGWFPATYVKVLQG

SEQ ID NO: 450 - protein, 65 aa, Artificial Sequence
  Description of Artificial Sequence:  Synthetic Peptide
KKPEIAQVTSAYAASGTEQLSLAPGQLILILKKNTSGWWQGELQARGKKRQKGWFPASHVKLLGP

SEQ ID NO: 451 - protein, 65 aa, Artificial Sequence
  Description of Artificial Sequence:  Synthetic Peptide
SSGEIAQVTSAYVASGSEQLSLAPGQLILILKKNTSGWWQGELQARGKKRQKGWFPASHVKLLGP

SEQ ID NO: 452 - protein, 65 aa, Artificial Sequence
  Description of Artificial Sequence:  Synthetic Peptide
KKPEIAQVIASYAATGPEQLTLAPGQLILIRKKNPGGWWEGELQARGKKRQIGWFPANYVKLLSP

SEQ ID NO: 453 - protein, 62 aa, Artificial Sequence
  Description of Artificial Sequence:  Synthetic Peptide
KQSTTATAEYDYEKDEDNEIGFSEGDLIIDIEFVDDDWWQGKHAKTGEVGLFPATYVSLNEK

SEQ ID NO: 454 - protein, 65 aa, Artificial Sequence
  Description of Artificial Sequence:  Synthetic Peptide
KKPEIAQVIASYTATGPEQLTLAPGQLILIRKKNPGGWWEGELQARGKKRQIGWFPANYVKLLSP

SEQ ID NO: 455 - protein, 65 aa, Artificial Sequence
  Description of Artificial Sequence:  Synthetic Peptide
KKPEIAQVIAPYTATGAEQLTLAPGQLILIRKKNPGGWWEGELQARGKKRQIGWFPANYVKLLSP

SEQ ID NO: 456 - protein, 65 aa, Artificial Sequence
  Description of Artificial Sequence:  Synthetic Peptide
RKGEVAQVIAPYEATSSEQLSLQRGQLIMIRKKTDSGWWEGELQAKGRRRQIGWFPATYVKILQG

SEQ ID NO: 457 - protein, 65 aa, Artificial Sequence
  Description of Artificial Sequence:  Synthetic Peptide
HTFTNAVAVEDFCGVEANELSLSIGDQVWVIERSTTQVWKGIVFGRKGNSRSGFFQSNVIEDAGA

SEQ ID NO: 458 - protein, 61 aa, Artificial Sequence
  Description of Artificial Sequence:  Synthetic Peptide
YQLDRVIARFDFITKDAGELSLHRGDVIEVINRDDENWWRGRTSDGRCGLFPSNYVDDLPS

SEQ ID NO: 459 - protein, 65 aa, Artificial Sequence
  Description of Artificial Sequence:  Synthetic Peptide
EVGDILVVIHDFQARSSDELSLTKGDRVELIERDDEFGDGWFLGKHLANGNSGLFPEVYTRPAPK

SEQ ID NO: 460 - protein, 64 aa, Artificial Sequence
  Description of Artificial Sequence:  Synthetic Peptide
ASQRFVIALHSFPGKSSDELPLVEGRKYLLIKMDEEFGDGWWEGEDEQGNRGIFPASHVELISD

SEQ ID NO: 461 - protein, 67 aa, Artificial Sequence
  Description of Artificial Sequence:  Synthetic Peptide
SSRKVVRMKYSFEPETENELKLKKGDLLLVLKEIDEGWWVGEKLGEDGVFTGNTGMFPSNYCVPAHP

SEQ ID NO: 462 - protein, 62 aa, Artificial Sequence
  Description of Artificial Sequence:  Synthetic Peptide
RASKAFVASYEYEAQKDDELNLPLGAIITLVTVETNEDGWYRGELNGKVGLFPSNYAREVTY

SEQ ID NO: 463 - protein, 61 aa, Artificial Sequence
  Description of Artificial Sequence:  Synthetic Peptide
SSKTKAVVKFTYEPRLEDELGLTKGDFVYVVEKSTDGWWKGEAPNGGVGWFPSNYVEEVEA

SEQ ID NO: 464 - protein, 62 aa, Artificial Sequence
  Description of Artificial Sequence:  Synthetic Peptide
RVIGTAVARYNFAARDMRELSLREGDVVRIYSRIGGDQGWWKGETNGRIGWFPSTYVEEEGI

SEQ ID NO: 465 - protein, 62 aa, Artificial Sequence
  Description of Artificial Sequence:  Synthetic Peptide
RVIGTAVARYNFAARDMRELSLREGDVVKIYSRIGGDQGWWKGETNGRIGWFPSTYVEEEGV

SEQ ID NO: 466 - protein, 62 aa, Artificial Sequence
  Description of Artificial Sequence:  Synthetic Peptide
RVIGTAVARYNFAARDMRELSLREGDVVKIYSRIGGDQGWWKGETNGRVGWFPSTYVEEEGV

SEQ ID NO: 467 - protein, 60 aa, Artificial Sequence
  Description of Artificial Sequence:  Synthetic Peptide
KVLGIAIARYDFCARDMRELSLLKGDMVKIYTKMSANGWWRGEVNGRVGWFPSTYVEEDE

SEQ ID NO: 468 - protein, 60 aa, Artificial Sequence
  Description of Artificial Sequence:  Synthetic Peptide
KVLGIAIARYDFCARDMRELSLLKGDVVKIYTKMSANGWWRGEVNGRVGWFPSTYVEEDE

SEQ ID NO: 469 - protein, 61 aa, Artificial Sequence
  Description of Artificial Sequence:  Synthetic Peptide
KYFGTAKARYDFCARDRSELSLKEGDIIKILNKKGQQGWWRGEIYGRIGWFPSNYVEEDYS

SEQ ID NO: 470 - protein, 61 aa, Artificial Sequence
  Description of Artificial Sequence:  Synthetic Peptide
KYFGTAKARYDFCARDRSELSLKEGDIIKILNKKGQQGWWRGEIYGRVGWFPANYVEEDYS

SEQ ID NO: 471 - protein, 64 aa, Artificial Sequence
  Description of Artificial Sequence:  Synthetic Peptide
SDVEWCIALYDYDATAEDELTFEEGDKIKIITKTAHGVDDGWWEGELDGKFGNFPSLVVEECDE

SEQ ID NO: 472 - protein, 64 aa, Artificial Sequence
  Description of Artificial Sequence:  Synthetic Peptide
NNQLYCVALYDYDATAEDELTFEEGQIIKLITKSPHGVDDGWWEGELMGKIGNFPSLVVEECDE

SEQ ID NO: 473 - protein, 63 aa, Artificial Sequence
  Description of Artificial Sequence:  Synthetic Peptide
ASVCFVKALYDYEGQTDDELSFPEGAIIRILNKENQDDDGFWEGEFNGRIGVFPSVLVEELSA

SEQ ID NO: 474 - protein, 63 aa, Artificial Sequence
  Description of Artificial Sequence:  Synthetic Peptide
ASVCFVKALYDYEGQTDDELSFPEGAIIRILNKENQDDDGFWEGEFSGRIGVFPSVLVEELSA

SEQ ID NO: 475 - protein, 66 aa, Artificial Sequence
  Description of Artificial Sequence:  Synthetic Peptide
ATKQVQKVVYPHNPHETDELELRIGDYIYLNTEVVDSSSDGWAEGISWLTGSTGHLPVNYTERTAE

SEQ ID NO: 476 - protein, 64 aa, Artificial Sequence
  Description of Artificial Sequence:  Synthetic Peptide
PTAFLAQALYSYTGQSAEELSFPEGALIRLLPRAQDGVDDGFWRGEFGGRVGVFPSLLVEELLG

SEQ ID NO: 477 - protein, 61 aa, Artificial Sequence
  Description of Artificial Sequence:  Synthetic Peptide
PESKTATAEYDYEKDEDNEIGFSEGDLIVEIEFVDDDWWQGKHSKTGEVGLFPANYVVLNE

SEQ ID NO: 478 - protein, 61 aa, Artificial Sequence
  Description of Artificial Sequence:  Synthetic Peptide
KENPWATAEYDYDAAEDNELTFVENDKIINIEFVDDDWWLGELEKDGSKGLFPSNYVSLGN

SEQ ID NO: 479 - protein, 61 aa, Artificial Sequence
  Description of Artificial Sequence:  Synthetic Peptide
AEAPWATAEYDYEAGEDNELTFAENDKIINIEFVDDDWWLGELETTGQKGLFPSNYVVLGN

SEQ ID NO: 480 - protein, 61 aa, Artificial Sequence
  Description of Artificial Sequence:  Synthetic Peptide
DGGKRALVQYDYEKAEDNEIDLQEGDYVTNIQMVDDDWWMGTNAQGESGLFPSNYVEVVED

SEQ ID NO: 481 - protein, 61 aa, Artificial Sequence
  Description of Artificial Sequence:  Synthetic Peptide
PTKTPAIVIYDYSPEEENEIELVENEQIQILEFVDDGWWLGENSKGQQGLFPSNYVEITGP

SEQ ID NO: 482 - protein, 66 aa, Artificial Sequence
  Description of Artificial Sequence:  Synthetic Peptide
VSKQVHKVLYPHTPRETDELELRIGDHIYLNPEAIQASTDGWVEGISWLTGTTGYLPENYTERTAE

SEQ ID NO: 483 - protein, 66 aa, Artificial Sequence
  Description of Artificial Sequence:  Synthetic Peptide
VHYQTLRALFQYKPQNVDELTLSPGDYIFVDPTQQDEASEGWVIGISQRTGCRGFLPENYTDRASE

SEQ ID NO: 484 - protein, 66 aa, Artificial Sequence
  Description of Artificial Sequence:  Synthetic Peptide
VHYQTLKALFQYKPQNADELMLSAGDYIFVDPTQQEEASEGWAIGISHRTGCRGFLPENYTERANE

SEQ ID NO: 485 - protein, 66 aa, Artificial Sequence
  Description of Artificial Sequence:  Synthetic Peptide
ANHETLQVIYPYSPQNDDELELVPGDFIFMSPMEQTSTSEGWIYGTSLTTGCSGLLPENYITKADE

SEQ ID NO: 486 - protein, 66 aa, Artificial Sequence
  Description of Artificial Sequence:  Synthetic Peptide
ANHETLQVIYPYTPQNDDELELVPGDFIFMSPMEQTSTSEGWIYGTSLTTGCSGLLPENYITKADE

SEQ ID NO: 487 - protein, 62 aa, Artificial Sequence
  Description of Artificial Sequence:  Synthetic Peptide
QNAHNQIAIYAHQPRTADEIPMEPGDIIGVAGNHWDGYSKGVNRKLGRTGLYPSYKVREKIE

SEQ ID NO: 488 - protein, 62 aa, Artificial Sequence
  Description of Artificial Sequence:  Synthetic Peptide
QNAHNQIAIYPHEPRTADEIPMEPGDIIGVAGNHWDGYSKGVNRKLGRTGLYPSYKVREKIE

SEQ ID NO: 489 - protein, 62 aa, Artificial Sequence
  Description of Artificial Sequence:  Synthetic Peptide
PNAHNQIAIYPHQPRTEGEIPMEPGDIIGVAGNHWDGYPKGVNRKLGRTGLYPSYKVREKIE

SEQ ID NO: 490 - protein, 62 aa, Artificial Sequence
  Description of Artificial Sequence:  Synthetic Peptide
QNAHNQIAVYPHKPRTEEEIPMEPGDIIGVAGNHWDGYSKGINRKLGKTGLYPSYKVREKIE

SEQ ID NO: 491 - protein, 65 aa, Artificial Sequence
  Description of Artificial Sequence:  Synthetic Peptide
GNFPMYIAINEYFKRMEDELDMKPGDKIKVITDDEEYKDGWYFGRNLRTNEEGLYPVVFTQKITV

SEQ ID NO: 492 - protein, 65 aa, Artificial Sequence
  Description of Artificial Sequence:  Synthetic Peptide
KSFPLYIAVNQYSKRMEDELNMKPGDKIKVITDDGEYNDGWYYGRNLRTKEEGLYPAVFTKRIAI

SEQ ID NO: 493 - protein, 60 aa, Artificial Sequence
  Description of Artificial Sequence:  Synthetic Peptide
GGGEPFQALYNYTPRNEDELELRESDVVDVMEKCDDGWFVGTSRRTKFFGTFPGNYVKRL

SEQ ID NO: 494 - protein, 60 aa, Artificial Sequence
  Description of Artificial Sequence:  Synthetic Peptide
GGGEPFQALYNYTPRNEDELELRESDVIDVMEKCDDGWFVGTSRRTKFFGTFPGNYVKRL

SEQ ID NO: 495 - protein, 62 aa, Artificial Sequence
  Description of Artificial Sequence:  Synthetic Peptide
QDLFSYQALYSYIPQNDDELELRDGDIVDVMEKCDDGWFVGTSRRTKQFGTFPGNYVKPLYL

SEQ ID NO: 496 - protein, 62 aa, Artificial Sequence
  Description of Artificial Sequence:  Synthetic Peptide
LDLCSYQALYSYVPQNDDELELRDGDIVDVMEKCDDGWFVGTSRRTRQFGTFPGNYVKPLYL

SEQ ID NO: 497 - protein, 60 aa, Artificial Sequence
  Description of Artificial Sequence:  Synthetic Peptide
IHWTPYRAMYQYRPQNEDELELREGDRVDVMQQCDDGWFVGVSRRTQKFGTFPGNYVAPV

SEQ ID NO: 498 - protein, 60 aa, Artificial Sequence
  Description of Artificial Sequence:  Synthetic Peptide
SEPLAYRALYKYRPQNSDELELLEGDVVHVLEKCDDGWFVGTSQRTGCFGTFPGNYVERA

SEQ ID NO: 499 - protein, 60 aa, Artificial Sequence
  Description of Artificial Sequence:  Synthetic Peptide
KGSEMYRAVYPYQPQKEDELQLYTNDIIFVVEKCDDGWFIGTSLRTGDFGIFPGNYVKRH

SEQ ID NO: 500 - protein, 62 aa, Artificial Sequence
  Description of Artificial Sequence:  Synthetic Peptide
LPLNVYLALYAYKPQKNDELELRKGEMYRVLEKCQDGWFKGASLKTGVSGVFPGNYVTPVSR

SEQ ID NO: 501 - protein, 62 aa, Artificial Sequence
  Description of Artificial Sequence:  Synthetic Peptide
LPLNVYLALYAYKPQKSDELELHKGEMYRVLEKCQDGWFKGASLRTGVSGVFPGNYVTPVSR

SEQ ID NO: 502 - protein, 62 aa, Artificial Sequence
  Description of Artificial Sequence:  Synthetic Peptide
TRPSVYVAIYPYTPRKEDELELRKGEMFLVFERCQDGWFKGTSMHTSKIGVFPGNYVAPVTR

SEQ ID NO: 503 - protein, 62 aa, Artificial Sequence
  Description of Artificial Sequence:  Synthetic Peptide
TRPSVYVAIYPYTPRKEDELELRKGEMFLVFERCQDGWYKGTSMHTSKIGVFPGNYVAPVTR

SEQ ID NO: 504 - protein, 61 aa, Artificial Sequence
  Description of Artificial Sequence:  Synthetic Peptide
QLPTMYVALYPYKPQKPDELELKKGAVYYVTERCQDGWFKGTNWQKKSGVFPGNYVAIHKG

SEQ ID NO: 505 - protein, 60 aa, Artificial Sequence
  Description of Artificial Sequence:  Synthetic Peptide
LPRERYRVVVSYPPQSEAEIELKEGDIVFVHKKREDGWYKGTLQRNGRTGLFPGSFVESF

SEQ ID NO: 506 - protein, 60 aa, Artificial Sequence
  Description of Artificial Sequence:  Synthetic Peptide
LPRERYRVVVSYPPQSEAEIELKEGDIVFVHKKHEDGWFKGTLQRNGRTGLFPGSFVESF

SEQ ID NO: 507 - protein, 62 aa, Artificial Sequence
  Description of Artificial Sequence:  Synthetic Peptide
LSNNMFVALHTYSAHRPEELDLQKGEGIRVLGKYQDGWLKGLSLLTGRTGIFPSDYVIPVFS

SEQ ID NO: 508 - protein, 62 aa, Artificial Sequence
  Description of Artificial Sequence:  Synthetic Peptide
LSANMFVALHSYSAHGPDELDLQKGEGVRVLGKCQDGWLRGVSLVTGRVGIFPNNYVIPIFR

SEQ ID NO: 509 - protein, 67 aa, Artificial Sequence
  Description of Artificial Sequence:  Synthetic Peptide
PVLYQVVAQHSYSAQGPEDLGFRQGDTVDVLCEEPDVPLAVDQAWLEGHCDGRIGIFPKCFVVPAGP

SEQ ID NO: 510 - protein, 62 aa, Artificial Sequence
  Description of Artificial Sequence:  Synthetic Peptide
LDCPQVQCVHPYVAQQPDELTLELADILNILEKTEDGWIFGERLHDQERGWFPSSMTEEILN

SEQ ID NO: 511 - protein, 62 aa, Artificial Sequence
  Description of Artificial Sequence:  Synthetic Peptide
LDCPQVQCVHPYVAQQPDELTLELADILNILDKTDDGWIFGERLHDQERGWFPSSMTEEILN

SEQ ID NO: 512 - protein, 62 aa, Artificial Sequence
  Description of Artificial Sequence:  Synthetic Peptide
EDIPQVQCIKGYTAQEHDELTLEKADILRLAAKTSDGWMEVIRLCDGERGWVPATHVEEITN

SEQ ID NO: 513 - protein, 62 aa, Artificial Sequence
  Description of Artificial Sequence:  Synthetic Peptide
YDSPQVQCLRAYKPRENDELALEKADVVMVTQQSSDGWLEGVRLSDGEQGWFPVQQVEFISN

SEQ ID NO: 514 - protein, 62 aa, Artificial Sequence
  Description of Artificial Sequence:  Synthetic Peptide
WDCPQALVVHAYQPSQADELQLNIGDSLNILRKMPDGWLYGERAGDGLGGWFPSSYVQAIIN

SEQ ID NO: 515 - protein, 62 aa, Artificial Sequence
  Description of Artificial Sequence:  Synthetic Peptide
WDCPQVVAKHSYESDEPDVLQLELGDVVNVSRKLPDGWYQGERIRDGAVGWFPGSYTEELNS

SEQ ID NO: 516 - protein, 62 aa, Artificial Sequence
  Description of Artificial Sequence:  Synthetic Peptide
WDCPQVIAVHPYQALQPDELDLDIKDVVNVHRKMADGWYEGERIRDGAVGWFPSNYTKEIPS

SEQ ID NO: 517 - protein, 69 aa, Artificial Sequence
  Description of Artificial Sequence:  Synthetic Peptide
PVIEYAKAMYPLIGNEAPGLANFHKGDYLLITEIVNKDWYKGEVYDNDRIDRNHRIGLIPYNFIQLLHQ

SEQ ID NO: 518 - protein, 63 aa, Artificial Sequence
  Description of Artificial Sequence:  Synthetic Peptide
FSPKKAVATGDYHSEDPKHLYVTRGDHLLIVEDVDDYYYKGKLEAFKTLPAGILPKNIVKLEN

SEQ ID NO: 519 - protein, 63 aa, Artificial Sequence
  Description of Artificial Sequence:  Synthetic Peptide
GAMVYGVVLYDFQAERADELEAKQGEAIIVIAQSNPEWFVAKPIGRLGGPGLIPVSFVEIRDM

SEQ ID NO: 520 - protein, 63 aa, Artificial Sequence
  Description of Artificial Sequence:  Synthetic Peptide
SQPLFGIVQFDFAAERPDELEAKAGEAIIIIARSNHEWLVAKPIGRLGGPGLIPLSFIQLRDL

SEQ ID NO: 521 - protein, 63 aa, Artificial Sequence
  Description of Artificial Sequence:  Synthetic Peptide
TPTLHGVVLYDFQAERPDELQASKGDNIIIQAQSNHEWFVAKPVGRLGGPGLIPASFIEIRDI

SEQ ID NO: 522 - protein, 63 aa, Artificial Sequence
  Description of Artificial Sequence:  Synthetic Peptide
MGSLYAIVLYDFKAEKADELTTYVGENLFICAHHNCEWFIAKPIGRLGGPGLVPVGFVSIIDI

SEQ ID NO: 523 - protein, 67 aa, Artificial Sequence
  Description of Artificial Sequence:  Synthetic Peptide
TGFYYAIVQYTFEDPLPSCDAPRLELFIGDRICVYGQHGEWGYGRKFDEKNGKCGIFPLAYVQIVQK

SEQ ID NO: 524 - protein, 62 aa, Artificial Sequence
  Description of Artificial Sequence:  Synthetic Peptide
KRQKYGVAIYNYNASQDVELSLQIGDTVHILEMYEGWYRGYALQNRSKKGIFPETYIHLKEA

SEQ ID NO: 525 - protein, 62 aa, Artificial Sequence
  Description of Artificial Sequence:  Synthetic Peptide
REEKYGVAFYNYDARGADELSLQIGDTVHILETYEGWYRGYTLRKKSKKGIFPASYIHLKEA

SEQ ID NO: 526 - protein, 62 aa, Artificial Sequence
  Description of Artificial Sequence:  Synthetic Peptide
DKERHGVAIYNFQGSEAQHLTLQIGDVVRIQETCGDWYRGYLIKHKLSQGIFPTSFIHLKEV

SEQ ID NO: 527 - protein, 62 aa, Artificial Sequence
  Description of Artificial Sequence:  Synthetic Peptide
TPSILGQSIHNWHGDVRFGLALDVGDSVDIVEECKHWYRGSCPRKSRAVGLFPKTYIHIKDL

SEQ ID NO: 528 - protein, 67 aa, Artificial Sequence
  Description of Artificial Sequence:  Synthetic Peptide
KETVFVKAIYSFTGRNEKELDLHTGDVIQVSEQLGPDWYMGEKVNSKAEKLGNSGMFPVNYCTRIYD

SEQ ID NO: 529 - protein, 59 aa, Artificial Sequence
  Description of Artificial Sequence:  Synthetic Peptide
GTGTRVVARFSWYRSSPEAKNELIFPKGAEITEVEGLNEEWGVGWYMGEVGLFPRGYCM

SEQ ID NO: 530 - protein, 63 aa, Artificial Sequence
  Description of Artificial Sequence:  Synthetic Peptide
IKPEQLKTIVAYSEHKKDYLMYRQGEIITVLDKNNNAPYWKGVLNSGKTGLFNPANTVAYLDS

SEQ ID NO: 531 - protein, 61 aa, Artificial Sequence
  Description of Artificial Sequence:  Synthetic Peptide
NNAKYARALKDYNVSDTSLLPFKRNDIITITFKDQENKWFMGQLNGKEGSFPVDHVEILLS

SEQ ID NO: 532 - protein, 61 aa, Artificial Sequence
  Description of Artificial Sequence:  Synthetic Peptide
EENLYATALYPYQASGQWHLPFKKDDKIVLLDIKSEEGWLKGELNGKIGYFPASYVEIIAI

SEQ ID NO: 533 - protein, 62 aa, Artificial Sequence
  Description of Artificial Sequence:  Synthetic Peptide
VKVVYYRALYPFESRSHDEITIQPGDIVMVDESQTGEPGWLGGELKGKTGWFPANYAEKIPE

SEQ ID NO: 534 - protein, 67 aa, Artificial Sequence
  Description of Artificial Sequence:  Synthetic Peptide
VKVVYYRALYPFESRSHDEITIQPGDIVMVKGEWVDESQTGEPGWLGGELKGKTGWFPANYAEKIPE

SEQ ID NO: 535 - protein, 67 aa, Artificial Sequence
  Description of Artificial Sequence:  Synthetic Peptide
AKVVYYRALYPFESRSHDEITIQPGDIVMVKGEWVDESQTGEPGWLGGEPKGKTGWFPANYAEKIPE

SEQ ID NO: 536 - protein, 62 aa, Artificial Sequence
  Description of Artificial Sequence:  Synthetic Peptide
VKVVYYRAMYPFEARSHDEITIHPGDIVMVDESQTGEPGWLGGEIKGKTGWFPANYAEKIPE

SEQ ID NO: 537 - protein, 62 aa, Artificial Sequence
  Description of Artificial Sequence:  Synthetic Peptide
VKVVYYRALYPFDARSHDEITIEPGDIIMVDESQTGEPGWLGGELKGKTGWFPANYAERMPE

SEQ ID NO: 538 - protein, 62 aa, Artificial Sequence
  Description of Artificial Sequence:  Synthetic Peptide
EGFVKYQAVYEFNARNAEEITFVPGDIILVPLEQNAEPGWLAGEINGHTGWFPESYVEKLEV

SEQ ID NO: 539 - protein, 62 aa, Artificial Sequence
  Description of Artificial Sequence:  Synthetic Peptide
PGYVKYRAIYEFSARNSDEISFQPGDIVMVPLEQNAEPGWLAGEINGHTGWFPESFVEKVDS

SEQ ID NO: 540 - protein, 62 aa, Artificial Sequence
  Description of Artificial Sequence:  Synthetic Peptide
HDTYKCRALFAFEARSEDELSFEPGDVIIVFQSHAAEPGWRAGQLREKVGWFPEAFVEAIAA

SEQ ID NO: 541 - protein, 61 aa, Artificial Sequence
  Description of Artificial Sequence:  Synthetic Peptide
TPFRKAKALYACKAEHDSELSFTAGTVFDNVHPSQEPGWLEGTLNGKTGLIPENYVEFLSG

SEQ ID NO: 542 - protein, 59 aa, Artificial Sequence
  Description of Artificial Sequence:  Synthetic Peptide
TPFRKAKALYACQAEHDSELSFTAGTVFDNVHPSQEPGWLEGTLNGKTGLIPENYVEFL

SEQ ID NO: 543 - protein, 59 aa, Artificial Sequence
  Description of Artificial Sequence:  Synthetic Peptide
SPLRKARALYACKAEHDSELSFTAGTVFDNVHPSQEPGWLEGTLNGKTGLIPENYVEFL

SEQ ID NO: 544 - protein, 59 aa, Artificial Sequence
  Description of Artificial Sequence:  Synthetic Peptide
VINRKARAVYPCEAEHSSELSFEIGAIFEDVQTSREPGWLEGTLNGKRGLIPQNYVKLL

SEQ ID NO: 545 - protein, 59 aa, Artificial Sequence
  Description of Artificial Sequence:  Synthetic Peptide
IRSRKARAVYPCEAEHSSELSFDIGAIFEDVQTSREPGWLEGTLNGKRGLIPQNYVKLL

SEQ ID NO: 546 - protein, 61 aa, Artificial Sequence
  Description of Artificial Sequence:  Synthetic Peptide
TGTARVRTLYACMGESEGELSFEPNQIITNVRYSHEPGWLQGTLNGKTGLIPENYVEHLKP

SEQ ID NO: 547 - protein, 60 aa, Artificial Sequence
  Description of Artificial Sequence:  Synthetic Peptide
YLSRRVKTLYACTPDHHSELSFEPGQIITNVYESNEDGWLVGTLNGKTGLIPSNYVEPLP

SEQ ID NO: 548 - protein, 61 aa, Artificial Sequence
  Description of Artificial Sequence:  Synthetic Peptide
VEGRSLRALYPYKARAPDELTFDEGEVIVCVSRAQEEGWLKGVCNQRTGLFPINYVAPCDE

SEQ ID NO: 549 - protein, 61 aa, Artificial Sequence
  Description of Artificial Sequence:  Synthetic Peptide
DTAPTVVALYDYTANRSDELTIHRGDIIRVFFKDNEDWWYGSIGKGQEGYFPANHVASETL

SEQ ID NO: 550 - protein, 61 aa, Artificial Sequence
  Description of Artificial Sequence:  Synthetic Peptide
DTAPTVVALYDYTANRSDELTIHRGDIIRVFFKDNEDWWYGSIGKGQEGYLPANHVASETL

SEQ ID NO: 551 - protein, 61 aa, Artificial Sequence
  Description of Artificial Sequence:  Synthetic Peptide
DPPPMVVALYDYTASRSDELTIHRGDIIRVYFKDNEDWWYGSVRKGQEGFFPANHVASETL

SEQ ID NO: 552 - protein, 61 aa, Artificial Sequence
  Description of Artificial Sequence:  Synthetic Peptide
DPPPMVVALYDYTASRSDELTIHRGDIIRVFFKDNEDWWYGSLGKGQEGFFPANHVASETL

SEQ ID NO: 553 - protein, 61 aa, Artificial Sequence
  Description of Artificial Sequence:  Synthetic Peptide
TFKCSVRALFDYKAQREDELTFTKNTIIQNVEKQEGGWWRGDCGGKKQMWFPANYMEEIFS

SEQ ID NO: 554 - protein, 61 aa, Artificial Sequence
  Description of Artificial Sequence:  Synthetic Peptide
TFKCSVRALFDYKAQREDELTFTKNTIIQNVEKQEGGWWRGDCGGKKQMWFPANYVEEIFS

SEQ ID NO: 555 - protein, 61 aa, Artificial Sequence
  Description of Artificial Sequence:  Synthetic Peptide
TFKCAVKALFDYKAQREDELTFIKSAIIQNVEKQEGGWWRGDYGGKKQLWFPSNYVEEMVN

SEQ ID NO: 556 - protein, 61 aa, Artificial Sequence
  Description of Artificial Sequence:  Synthetic Peptide
TFKCAVKALFDYKAQREDELTFTKSAIIQNVEKQEGGWWRGDYGGKKQLWFPSNYVEEMVS

SEQ ID NO: 557 - protein, 61 aa, Artificial Sequence
  Description of Artificial Sequence:  Synthetic Peptide
TFKCAVKALFDYKAQREDELTFTKSAIIQNVEKQDGGWWRGDYGGKKQLWFPSNYVEEMIN

SEQ ID NO: 558 - protein, 61 aa, Artificial Sequence
  Description of Artificial Sequence:  Synthetic Peptide
TFKCTVKAMYEYKAQRDDELSFIKNAIISNVDKQEGGWWKGDCGGKKQLWFPANYVEEISP

SEQ ID NO: 559 - protein, 61 aa, Artificial Sequence
  Description of Artificial Sequence:  Synthetic Peptide
ATPITCKALFDYTAVRPDELSFCKDAVITNVEKHGGGWWKGDCGNKNQKWFPANHVEEVQA

SEQ ID NO: 560 - protein, 61 aa, Artificial Sequence
  Description of Artificial Sequence:  Synthetic Peptide
NENVTVKALYDYKAQRDDELSFCKHAIITNVVKRGNDWWLGDYGGKRQHYFPANYVQELSA

SEQ ID NO: 561 - protein, 61 aa, Artificial Sequence
  Description of Artificial Sequence:  Synthetic Peptide
EENVTCKALYSYKANKPDELSFPKHAIITNVQRDNSMWWIGDYGGMIKKHLPANYVKVIDS

SEQ ID NO: 562 - protein, 61 aa, Artificial Sequence
  Description of Artificial Sequence:  Synthetic Peptide
EEHVTCKALYSYKANKPDELSFPKHAIITNVQRNNTMWWIGDYGGMIKKHLPANYVKVIDA

SEQ ID NO: 563 - protein, 61 aa, Artificial Sequence
  Description of Artificial Sequence:  Synthetic Peptide
EEYVTCKALYSYKADKPDELSFPKHAIITNVQRNNSMWWKGDYGGMIQQHLPANYVKVIDS

SEQ ID NO: 564 - protein, 61 aa, Artificial Sequence
  Description of Artificial Sequence:  Synthetic Peptide
MPQRTVKALYDYKAKRSDELTFCRGALIHNVSKEPGGWWKGDYGTRIQQYFPSNYVEDISA

SEQ ID NO: 565 - protein, 61 aa, Artificial Sequence
  Description of Artificial Sequence:  Synthetic Peptide
MPQRTVKALYDYKAKRSDELSFCRGALIHNVSKEPGGWWKGDYGTRIQQYFPSNYVEDIST

SEQ ID NO: 566 - protein, 60 aa, Artificial Sequence
  Description of Artificial Sequence:  Synthetic Peptide
SATPTAVALYNFAGEQPGDLAFKKGDVITILKKSDSQNDWWTGRTNGKEGIFPANYVRVS

SEQ ID NO: 567 - protein, 60 aa, Artificial Sequence
  Description of Artificial Sequence:  Synthetic Peptide
TSSPKAVALYSFAGEESGDLPFRKGDVITILKKSDSQNDWWTGRVNGREGIFPANYVELV

SEQ ID NO: 568 - protein, 60 aa, Artificial Sequence
  Description of Artificial Sequence:  Synthetic Peptide
LGPNQARAMYSFAGEQPGDLSFQKGDIIDIVERSGSHDDWWTGRIGYREGIFPANYVKLS

SEQ ID NO: 569 - protein, 61 aa, Artificial Sequence
  Description of Artificial Sequence:  Synthetic Peptide
MKKNEAVALYTFNADQPGDLGFQKGEIITILKKTDSDNDWWTGMIGTRHGTFPSNYVKMIE

SEQ ID NO: 570 - protein, 60 aa, Artificial Sequence
  Description of Artificial Sequence:  Synthetic Peptide
NQPIEVTALYSFEGQQPGDLNFQAGDRITVISKTDSHFDWWEGKLRGQTGIFPANYVTMN

SEQ ID NO: 571 - protein, 60 aa, Artificial Sequence
  Description of Artificial Sequence:  Synthetic Peptide
NQPIEVTALYSFEGQQPGDLNFQAGDRIIVISKTDSNFDWWEGKLRGQTGIFPANYVTMN

SEQ ID NO: 572 - protein, 60 aa, Artificial Sequence
  Description of Artificial Sequence:  Synthetic Peptide
QLVEYVVAQYTFAGQGAGDLAFNEGDKIKIIKKTNTDQDWWVGELNGKRGNFPANYCKPV

SEQ ID NO: 573 - protein, 61 aa, Artificial Sequence
  Description of Artificial Sequence:  Synthetic Peptide
PKVETVTALYDYSAQAEGDLSFRAGDVIEIVTRTANENEWWIGKLHGKQGQFPGNYVQLNS

SEQ ID NO: 574 - protein, 62 aa, Artificial Sequence
  Description of Artificial Sequence:  Synthetic Peptide
PGVETVTALYDYQAQAAGDLSFPAGAVIEIVQRTPDVNEWWTGRYNGQQGVFPGNYVQLNKN

SEQ ID NO: 575 - protein, 60 aa, Artificial Sequence
  Description of Artificial Sequence:  Synthetic Peptide
PAAEHVVALYDYAAQAAGDLSFHAGDRIEVVSRTDNQNEWWIGRLNGAQGQFPGNYVQLE

SEQ ID NO: 576 - protein, 62 aa, Artificial Sequence
  Description of Artificial Sequence:  Synthetic Peptide
KPPFKVKARYGWSGQTKGDLGFLEGDIMEVTRIAGSWFYGKLLRNKKCSGYFPHNFVILLEE

SEQ ID NO: 577 - protein, 62 aa, Artificial Sequence
  Description of Artificial Sequence:  Synthetic Peptide
QLPCMVRALYAWPGEREGDLKFTEGDLIECLSIGDGKWWIGRHINTNTQGIFPSNFVHCLDI

SEQ ID NO: 578 - protein, 59 aa, Artificial Sequence
  Description of Artificial Sequence:  Synthetic Peptide
GDSSYVKALYAYTAQSDMELSIQEGDIIQVTNRNAGNGWSEGILNGVTGQFPANYVTDV

SEQ ID NO: 579 - protein, 74 aa, Artificial Sequence
  Description of Artificial Sequence:  Synthetic Peptide
GFLYKVRAQHDYTATDGDELELKAGEVVLVTQFENPDEQDDGWLMGIKETDWLQSKPFEQHRGVFPENFTEKNL

SEQ ID NO: 580 - protein, 64 aa, Artificial Sequence
  Description of Artificial Sequence:  Synthetic Peptide
KTLYFVTSTHNYKAVDTDELSFEQGVQIKVIEANEDDQLDDGWRLGELEDGKRGVFPENFTKKV

SEQ ID NO: 581 - protein, 65 aa, Artificial Sequence
  Description of Artificial Sequence:  Synthetic Peptide
GVLYRVKATYKYVREDVDELSFEVGDVINVVEYEDPEDQEEGWLMGNKEGTNEKGMFPANFTRPL

SEQ ID NO: 582 - protein, 65 aa, Artificial Sequence
  Description of Artificial Sequence:  Synthetic Peptide
GVLYRVKATYGYAKEDVDELSFEIGDLIRVIEYDDPEDQEEGWLMGQKEGTNEKGLFPANFTRPI

SEQ ID NO: 583 - protein, 65 aa, Artificial Sequence
  Description of Artificial Sequence:  Synthetic Peptide
EVPFKVVAQFPYKSDYEDDLNFEKDQEIIVTSVEDAEWYFGEYQDSNGDVIEGIFPKSFVAVQGS

SEQ ID NO: 584 - protein, 65 aa, Artificial Sequence
  Description of Artificial Sequence:  Synthetic Peptide
MSLFKVKAIFEYASGHEDDLNFPAGQIITVTDEEDADWYGGEYVDEAGVKQEGIFPRNFVERYEP

SEQ ID NO: 585 - protein, 65 aa, Artificial Sequence
  Description of Artificial Sequence:  Synthetic Peptide
SFPTRVVALYPYRSSFSDDLEFDPGQVIDVVSNLDGDWYTGTYVDSDGNRKIGSFPKDFTEPAED

SEQ ID NO: 586 - protein, 62 aa, Artificial Sequence
  Description of Artificial Sequence:  Synthetic Peptide
KAKEYCRTLFAYEGTNEDELTFKEGEIIHLISKETGEAGWWRGELNGKEGVFPDNFAVQINE

SEQ ID NO: 587 - protein, 62 aa, Artificial Sequence
  Description of Artificial Sequence:  Synthetic Peptide
KAKEYCRTLFPYTGTNEDELTFREGEIIHLISKETGEAGWWKGELNGKEGVFPDNFAVQISE

SEQ ID NO: 588 - protein, 62 aa, Artificial Sequence
  Description of Artificial Sequence:  Synthetic Peptide
KTKDYCKVIFPYEAQNDDELTIKEGDIVTLINKDCIDVGWWEGELNGRRGVFPDNFVKLLPS

SEQ ID NO: 589 - protein, 62 aa, Artificial Sequence
  Description of Artificial Sequence:  Synthetic Peptide
PQREFCRVEFPYAPQNDDELELKVDDIIAVISTELPDKGWWKGEIRGKVGVFPDNFVKMLAP

SEQ ID NO: 590 - protein, 62 aa, Artificial Sequence
  Description of Artificial Sequence:  Synthetic Peptide
PVRELCKVLFAYQPANEDELKLVEGDIITILSKELPDKGWWKGELRGRIGVFPDNFVSLLPP

SEQ ID NO: 591 - protein, 63 aa, Artificial Sequence
  Description of Artificial Sequence:  Synthetic Peptide
KTKEMARVKFVYNPQHDDELALKEIDMLINITNKNCGDAGWFEGELHGKKGLFPDNFVELVQV

SEQ ID NO: 592 - protein, 62 aa, Artificial Sequence
  Description of Artificial Sequence:  Synthetic Peptide
SCPETCRVLFDYQPEAPDELALQKGDLVKVLRKTTEDKGWWEGECQGRRGVFPDNFVIPPPP

SEQ ID NO: 593 - protein, 63 aa, Artificial Sequence
  Description of Artificial Sequence:  Synthetic Peptide
NKVRRVKTIYDCQADNDDELTFIEGEVIIVTGEEDQEWWIGHIEGQPERKGVFPVSFVHILSD

SEQ ID NO: 594 - protein, 63 aa, Artificial Sequence
  Description of Artificial Sequence:  Synthetic Peptide
SKVRRVKTIYDCQADNDDELTFMEGEVIVVTGEEDQEWWIGHIEGQPERKGVFPVSFVHILSD

SEQ ID NO: 595 - protein, 65 aa, Artificial Sequence
  Description of Artificial Sequence:  Synthetic Peptide
NGQRRCRALYDCVADNDDELEFKEGEILIVLNERTDDENWMEGIIEGQPTRKGMFPVSFVHMLPD

SEQ ID NO: 596 - protein, 65 aa, Artificial Sequence
  Description of Artificial Sequence:  Synthetic Peptide
GAMRRCRALYDCNADNDDELEFKEGEILIVLNERTDDENWMEGQIEGDSMRRGMFPVSFVQMMDD

SEQ ID NO: 597 - protein, 65 aa, Artificial Sequence
  Description of Artificial Sequence:  Synthetic Peptide
YANPVWTALFDYEPNGQDELALRKGDRVEVLSRDAAISGDEGWWAGQVGGQVGIFPSNYVSRGGG

SEQ ID NO: 598 - protein, 65 aa, Artificial Sequence
  Description of Artificial Sequence:  Synthetic Peptide
YANPVWTALFDYEPSGQDELALRKGDRVEVLSRDAAISGDEGWWAGQVGGQVGIFPSNYVSRGGG

SEQ ID NO: 599 - protein, 65 aa, Artificial Sequence
  Description of Artificial Sequence:  Synthetic Peptide
AGAGLWAALYDYEARGEDELSLRRGQLVEVLSQDAAVSGDEGWWAGQVQRRLGIFPANYVAPCRP

SEQ ID NO: 600 - protein, 65 aa, Artificial Sequence
  Description of Artificial Sequence:  Synthetic Peptide
TSSGMWAALYDYEARGEDELSLRRGQLVEVLSQDAAVSGDEGWWAGQVQRRLGIFPASYVAPCGP

SEQ ID NO: 601 - protein, 65 aa, Artificial Sequence
  Description of Artificial Sequence:  Synthetic Peptide
AALPYWTAVFEYEAAGEDELTLRLGDVVEVLSKDSQVSGDEGWWTGQLNQRVGIFPSNYVTPRSA

SEQ ID NO: 602 - protein, 66 aa, Artificial Sequence
  Description of Artificial Sequence:  Synthetic Peptide
PAGPVWTAVFDYEAAGDEELTLRRGDRVQVLSQDCAVSGDEGWWTGQLPSGRVGVFPSNYVAPGAP

SEQ ID NO: 603 - protein, 65 aa, Artificial Sequence
  Description of Artificial Sequence:  Synthetic Peptide
VSNPLWMAVFDYEPTAEEELTLRRGDLVEILSKDSTVSGDEGWWTGKIKDKVGIFPSNYVVSDDK

SEQ ID NO: 604 - protein, 65 aa, Artificial Sequence
  Description of Artificial Sequence:  Synthetic Peptide
GDGSLWTALYDYDAQGEDELTLRRGEIVVVLSTDSEVSGDVGWWTGKIGDKVGVFPKDFVTDEDP

SEQ ID NO: 605 - protein, 65 aa, Artificial Sequence
  Description of Artificial Sequence:  Synthetic Peptide
MMSPLWTARYDYEAQGDDELSLRVGQIVYVLSTDSSISGDEGWWTGKIGDRVGIFPSNFVTNEDP

SEQ ID NO: 606 - protein, 63 aa, Artificial Sequence
  Description of Artificial Sequence:  Synthetic Peptide
YKEVIATALYDYEPKAGSNQLQLRTDCQVLVIGKDGDSKGWWRGKIGDTVGYFPKEYVQEQKL

SEQ ID NO: 607 - protein, 62 aa, Artificial Sequence
  Description of Artificial Sequence:  Synthetic Peptide
FKEEIVVAIYDFAPNELNQLPMRQGCQVIVIGKEGDSKGWWRGKTLEKVGFFPKEYVRPAVI

SEQ ID NO: 608 - protein, 69 aa, Artificial Sequence
  Description of Artificial Sequence:  Synthetic Peptide
TAPIQTQAVYEFVARSPSELSLRAGQMLHVAPRDIQQTLNLLNTGWALATTNGQTSGIIPISYVKSPQQ

SEQ ID NO: 609 - protein, 65 aa, Artificial Sequence
  Description of Artificial Sequence:  Synthetic Peptide
DDHVVARAEYDFVAVSDEEISFRAGDMLNLALKEQQPKVRGWLLASLDGQTTGLIPANYVKILGK

SEQ ID NO: 610 - protein, 65 aa, Artificial Sequence
  Description of Artificial Sequence:  Synthetic Peptide
DDHVVARAEYDFNAVSDEEISFRAGDMLNLALKEQQPKVRGWLLASLDGQTTGLIPANYVKILGK

SEQ ID NO: 611 - protein, 65 aa, Artificial Sequence
  Description of Artificial Sequence:  Synthetic Peptide
DDHVVARAEYDFAAVSEEEISFRAGDMLNLALKEQQPKVRGWLLASLDGQTTGLIPANYVKILGK

SEQ ID NO: 612 - protein, 66 aa, Artificial Sequence
  Description of Artificial Sequence:  Synthetic Peptide
APHYTAQALFDFQASNEQELSFMNGETLRVAPKEEQPRVRGWLLASVADGSRIGLVPINYVRIVGK

SEQ ID NO: 613 - protein, 64 aa, Artificial Sequence
  Description of Artificial Sequence:  Synthetic Peptide
YHGTELVMLYDYKAQAPDDLSVRRGDWIYADLNNQTVDGWLWAYAPKTRKYGFIPKAYARPPAM

SEQ ID NO: 614 - protein, 62 aa, Artificial Sequence
  Description of Artificial Sequence:  Synthetic Peptide
EAIFKCTALYSYTAQNPDELTIVENEQLEVVGEGDGDGWLRARNYRGEEGYVPHNYLDIDQE

SEQ ID NO: 615 - protein, 62 aa, Artificial Sequence
  Description of Artificial Sequence:  Synthetic Peptide
GQTFKCTALYSYTAQNPDELTIVESEQLEVVGEGDGDGWLRARNYRGEEGFVPHNYLDVERD

SEQ ID NO: 616 - protein, 63 aa, Artificial Sequence
  Description of Artificial Sequence:  Synthetic Peptide
QPRGTARVMYDFAAEPGNNELTVNEGEIITITNPDVGGGWMEGRNIKGERGLVPTDYVEILPS

SEQ ID NO: 617 - protein, 62 aa, Artificial Sequence
  Description of Artificial Sequence:  Synthetic Peptide
MATKARVMYDFAAEPGNNELTVNEGEIITITNPDVGGGWLEGRNIKGERGLVPTDYVEILPS

SEQ ID NO: 618 - protein, 62 aa, Artificial Sequence
  Description of Artificial Sequence:  Synthetic Peptide
MATKARVMYDFAAEPGNNELTVTEGEIITVTNPNVGGGWLEGKNNKGEQGLVPTDYVEILPN

SEQ ID NO: 619 - protein, 62 aa, Artificial Sequence
  Description of Artificial Sequence:  Synthetic Peptide
MAVKAQVLYDFTAEPGNNELTVHEGETLTITNQNVGGGWVEAQNSRGNVGLVPVDYVEVNSA

SEQ ID NO: 620 - protein, 59 aa, Artificial Sequence
  Description of Artificial Sequence:  Synthetic Peptide
MKVRVIYDFSAQWSGELSVSIGEELTITNQNVGSGWWQAVNAFGKEGLIPSEFVEIIEL

SEQ ID NO: 621 - protein, 61 aa, Artificial Sequence
  Description of Artificial Sequence:  Synthetic Peptide
HQEQKAKMLYTFEAGGEGELSVLEGRELVVLEPDTGSGWTRVRAGYKEGNVPTSYVEILPP

SEQ ID NO: 622 - protein, 62 aa, Artificial Sequence
  Description of Artificial Sequence:  Synthetic Peptide
SPIGHCVAIYHFEGSSEGTISMAEGEDLSLMEEDKGDGWTRVRRKEGGEGYVPTSYLRVTLN

SEQ ID NO: 623 - protein, 62 aa, Artificial Sequence
  Description of Artificial Sequence:  Synthetic Peptide
SPIGQCVAIYHFEGSSEGTVSMSEGEDLSLMEEDKGDGWTRVRRKQGAEGYVPTSYLRVTLN

SEQ ID NO: 624 - protein, 62 aa, Artificial Sequence
  Description of Artificial Sequence:  Synthetic Peptide
SPIGQCVAIYHFEGSSEGTVSMSEGEDLSLMEEDKGDGWTRVRRKQGGEGYVPTSYLRVTLN

SEQ ID NO: 625 - protein, 62 aa, Artificial Sequence
  Description of Artificial Sequence:  Synthetic Peptide
PAIGHCKAIYPFDGHNEGTLAMKEGEVLYIIEEDKGDGWTRARRQNGEEGYVPTSYIDVTLE

SEQ ID NO: 626 - protein, 62 aa, Artificial Sequence
  Description of Artificial Sequence:  Synthetic Peptide
PAIGHCKAIYPFDGHNEGTLAMKEGEVLYIIEEDKGDGWTRARRQNGEEGYVPTTYIDVTLE

SEQ ID NO: 627 - protein, 62 aa, Artificial Sequence
  Description of Artificial Sequence:  Synthetic Peptide
PAIGTCKALYTFEGQNEGTISVVEGETLSVIEEDKGDGWTRIRRNEDEEGYVPTSYVEVYLD

SEQ ID NO: 628 - protein, 62 aa, Artificial Sequence
  Description of Artificial Sequence:  Synthetic Peptide
PAIGTCKALYTFEGQNEGTISVVEGETLSVIEEDKGDGWTRIRRNEDEEGYFPTSYVEVYLD

SEQ ID NO: 629 - protein, 62 aa, Artificial Sequence
  Description of Artificial Sequence:  Synthetic Peptide
PAIGTCKALYTFEGQNEGTISVVEGETLYVIEEDKGDGWTRIRRNEDEEGYVPTSYVEVCLD

SEQ ID NO: 630 - protein, 66 aa, Artificial Sequence
  Description of Artificial Sequence:  Synthetic Peptide
NPVGKCRALYPFEASSEGSIPMSEGEELQVIEIDQGDGWTRVRRENNSNGWDEGFVPTSYIEITLY

SEQ ID NO: 631 - protein, 63 aa, Artificial Sequence
  Description of Artificial Sequence:  Synthetic Peptide
PVLGEAIAQFAFDGAQDGTIRMEANEKLWLIEKDEGDGWTRVRKENNSADGFVPSSYLKVTWF

SEQ ID NO: 632 - protein, 64 aa, Artificial Sequence
  Description of Artificial Sequence:  Synthetic Peptide
ETAVTVTALFEFAKSSAETMSIEQGEILLVLEHDHGDGWTRTKNCRKHNEESGFVPTSYLQFPQ

SEQ ID NO: 633 - protein, 62 aa, Artificial Sequence
  Description of Artificial Sequence:  Synthetic Peptide
ETAVTVTALFEFAKSSAETMSIEQGEILLVLEHDHGDGWTRTKKKHNEESGFVPTSYLQFPQ

SEQ ID NO: 634 - protein, 60 aa, Artificial Sequence
  Description of Artificial Sequence:  Synthetic Peptide
MPIAQCRALYDFDGSSEGSVSMSVGEQLSVMDQDQGDGWVRVQKSTGDVGYVPASYIQII

SEQ ID NO: 635 - protein, 63 aa, Artificial Sequence
  Description of Artificial Sequence:  Synthetic Peptide
TGTRFGTALYDFTAGGDDELNLTAEEELEIEYEVDGWFYVKKKRPGRDGKMAGLVPVLYVNQS

SEQ ID NO: 636 - protein, 59 aa, Artificial Sequence
  Description of Artificial Sequence:  Synthetic Peptide
KKLQYVEALYDYQAGSDTEHSMTVGERFVLIKEDQGDGWAEVEKGGVTKSVPANYVQTV

SEQ ID NO: 637 - protein, 62 aa, Artificial Sequence
  Description of Artificial Sequence:  Synthetic Peptide
PRARLFRALYDFTARCAEELSVSRGDRLYALKEEGDYIFAQRLSGPPSTGLVPVTYLAKATP

SEQ ID NO: 638 - protein, 65 aa, Artificial Sequence
  Description of Artificial Sequence:  Synthetic Peptide
SEKEQMKALYDNAASEQEDLNLSLGIALSKEQIAKLKKDIIWYVEEEVQGQKVLVPKVYLTKNTL

SEQ ID NO: 639 - protein, 61 aa, Artificial Sequence
  Description of Artificial Sequence:  Synthetic Peptide
GRVKVYRALYDFQARSAQELTFSEGDLMYVSDEQPNKDWFQASIGGKKGLVPANYVISENV

SEQ ID NO: 640 - protein, 62 aa, Artificial Sequence
  Description of Artificial Sequence:  Synthetic Peptide
EMHGKAVALYDFQREDENELPLVEGQIIWVSYRHGQGWLVAEDPKTQESGLVPEEYVRLLRD

SEQ ID NO: 641 - protein, 62 aa, Artificial Sequence
  Description of Artificial Sequence:  Synthetic Peptide
IVNQRAVALYDFEPENDNELRLAEGDIVFISYKHGQGWLVAENESGSKTGLVPEEFVSYIQP

SEQ ID NO: 642 - protein, 63 aa, Artificial Sequence
  Description of Artificial Sequence:  Synthetic Peptide
SDDGKNKVLYAYVQKDDDEITITPGDKISLVARDTGSGWTKINNDTTGETGLVPTTYIRISSA

SEQ ID NO: 643 - protein, 68 aa, Artificial Sequence
  Description of Artificial Sequence:  Synthetic Peptide
SPPTICRVLYDFEPKHADEIEIREGQCVLVEDRIGDDWLIGHVISQHDNSSIDPRSGRFPTTYVSLRQ

SEQ ID NO: 644 - protein, 69 aa, Artificial Sequence
  Description of Artificial Sequence:  Synthetic Peptide
RHGHYFVALFDYQARTAEDLSFRAGDKLQVLDTLHEGWWFARHLEKRRDGSSQQLQGYIPSNYVAEDRS

SEQ ID NO: 645 - protein, 69 aa, Artificial Sequence
  Description of Artificial Sequence:  Synthetic Peptide
SHGQYFVALFDYQARTAEDLSFRAGDKLQVLDTSHEGWWLARHLEKKGTGLGQQLQGYIPSNYVAEDRS

SEQ ID NO: 646 - protein, 69 aa, Artificial Sequence
  Description of Artificial Sequence:  Synthetic Peptide
SQGQYFVALFDYEARTAEDLSFHAGDKLQVLDTSHEGWWLARHLEKKGPGLGQQLQGYIPSNYVAEDRS

SEQ ID NO: 647 - protein, 65 aa, Artificial Sequence
  Description of Artificial Sequence:  Synthetic Peptide
HLGPKYVGLWDFKSRTDEELSFRAGDVFHVARKEEQWWWATLLDEAGGAVAQGYVPHNYLAERET

SEQ ID NO: 648 - protein, 65 aa, Artificial Sequence
  Description of Artificial Sequence:  Synthetic Peptide
HLGPKYVGLWDFKARTDEELSFQAGDLLHVTKKEELWWWATLLDAEGKALAEGYVPHNYLAEKET

SEQ ID NO: 649 - protein, 62 aa, Artificial Sequence
  Description of Artificial Sequence:  Synthetic Peptide
DYASYYQGLWDCHGDQPDELSFQRGDLIRILSKEYNMYGWWVGELNSLVGIVPKEYLTTAFE

SEQ ID NO: 650 - protein, 62 aa, Artificial Sequence
  Description of Artificial Sequence:  Synthetic Peptide
DYADYYQGLWDCHGDQPDELSFQRGDLIRILSKEYNMYGWWVGELNSIIGIVPKDYLTTAFE

SEQ ID NO: 651 - protein, 64 aa, Artificial Sequence
  Description of Artificial Sequence:  Synthetic Peptide
LHNGDVYAVFSYEAQNGDELSFHVNEPLIVLRKGDDAENEWWWARNAAGEEGYVPRNLLGLYPR

SEQ ID NO: 652 - protein, 63 aa, Artificial Sequence
  Description of Artificial Sequence:  Synthetic Peptide
MNKGVIYALWDYEPQHDDELLMKEGDCMTVIRREDEEEIEWWWARLNDKEGYVPRNLLGLYPR

SEQ ID NO: 653 - protein, 63 aa, Artificial Sequence
  Description of Artificial Sequence:  Synthetic Peptide
MNKGVIYALWDYEPQNDDELPMKEGDCMTIIHREDEDEIEWWWARLNDKEGYVPRNLLGLYPR

SEQ ID NO: 654 - protein, 63 aa, Artificial Sequence
  Description of Artificial Sequence:  Synthetic Peptide
MNKGTVYALWDYEAQNSDELSFHEGDAITILRRKDENETEWWWARLGDREGYVPKNLLGLYPR

SEQ ID NO: 655 - protein, 63 aa, Artificial Sequence
  Description of Artificial Sequence:  Synthetic Peptide
MNKGVAYALWDYEAQNSDELSFHEGDALTILRRKDESETEWWWARLGDREGYVPKNLLGLYPR

SEQ ID NO: 656 - protein, 63 aa, Artificial Sequence
  Description of Artificial Sequence:  Synthetic Peptide
MNSGAVYALWDYSAEFGDELSFREGESVTVLRRDGPEETDWWWAALHGQEGYVPRNYFGLFPR

SEQ ID NO: 657 - protein, 63 aa, Artificial Sequence
  Description of Artificial Sequence:  Synthetic Peptide
INTGKVYAAYGYEAAFEDELSFDAGDELTVIEKDKVDKNWWTCEKNNGEKGQVPRTYLALYPS

SEQ ID NO: 658 - protein, 69 aa, Artificial Sequence
  Description of Artificial Sequence:  Synthetic Peptide
GDSFYIRALYDRLADVEQELSFKKDDILYVDDTLPQGTFGSWMAWQLDENAQKIQRGQIPSKYVMDQEF

SEQ ID NO: 659 - protein, 65 aa, Artificial Sequence
  Description of Artificial Sequence:  Synthetic Peptide
GRCCVFIARFPYDPPEEAEGELSLCAGDYLLVWTSGEPQGGYLDAELLDGRRGLVPASFVQRLVG

SEQ ID NO: 660 - protein, 62 aa, Artificial Sequence
  Description of Artificial Sequence:  Synthetic Peptide
LKPKHYVALFDYNARTEEETFLSRRDEVLLLADTDSEWWLVQNLSSGRKGYVPSSFVAKKGS

SEQ ID NO: 661 - protein, 62 aa, Artificial Sequence
  Description of Artificial Sequence:  Synthetic Peptide
ISTPYGIAKFDYAPTQSDEMGLRIGDTVLISKKVDAEWFYGENQNQRTFGIVPSSYLDIKIP

SEQ ID NO: 662 - protein, 63 aa, Artificial Sequence
  Description of Artificial Sequence:  Synthetic Peptide
LEAQSLRCLQPFCTQDTRDRPFQAQAQESLDVLLRHPSGWWLVENEDRQTAWFPAPYLEEAAP

SEQ ID NO: 663 - protein, 62 aa, Artificial Sequence
  Description of Artificial Sequence:  Synthetic Peptide
DVYVLVEHPFEYTGKDGRRIAIQPNERYRLLRRSTEHWWHVRREPGGRPFYLPAQYVRELPA

SEQ ID NO: 664 - protein, 62 aa, Artificial Sequence
  Description of Artificial Sequence:  Synthetic Peptide
DVYVLVEHPFEYTGKDGRRVAIRPNERYRLLRRNTEHWWHVRREPGGRPFYLPAQYVRELPA

SEQ ID NO: 665 - protein, 61 aa, Artificial Sequence
  Description of Artificial Sequence:  Synthetic Peptide
QVYIEVEYDYEYEAKDRKIVIKQGERYILVKKTNDDWWQVKPDENSKAFYVPAQYVKEVTR

SEQ ID NO: 666 - protein, 61 aa, Artificial Sequence
  Description of Artificial Sequence:  Synthetic Peptide
QVYIEVEYDYEYEAKDRKIVIKQGERYILVKKTNDDWWQVKPDENSKAFYVPAQYVREVTR

SEQ ID NO: 667 - protein, 61 aa, Artificial Sequence
  Description of Artificial Sequence:  Synthetic Peptide
QAYIEVEYDYEYEAKDRKIVIKQGERYILVKKTNDDWWQVKPDENSKAFYVPAQYVKEVTR

SEQ ID NO: 668 - protein, 62 aa, Artificial Sequence
  Description of Artificial Sequence:  Synthetic Peptide
IDCNFVHAIRGFEATVEGQVDATKGDMMILLDDSNSYWWLVKMCKNLAIGYLPAEYIETPSE

SEQ ID NO: 669 - protein, 62 aa, Artificial Sequence
  Description of Artificial Sequence:  Synthetic Peptide
IDFEFVYALHTFVATVEGQANATKGDTMVLLDDSNSYWWLVRVVKDSSIGYLPAEHIETPTE

SEQ ID NO: 670 - protein, 62 aa, Artificial Sequence
  Description of Artificial Sequence:  Synthetic Peptide
LDPDKLYALYAFNGHDSSHCQLGQDEPCILLNDQDAYWWLVKRITDGKIGFAPAEILETFPE

SEQ ID NO: 671 - protein, 36 aa, Artificial Sequence
  Description of Artificial Sequence:  Synthetic Peptide
DALPAGWEERQDANGRTYYVNHTARTTQWDRPTVLN

SEQ ID NO: 672 - protein, 36 aa, Artificial Sequence
  Description of Artificial Sequence:  Synthetic Peptide
FELPQGWEERQDANGRTYYVNHVARSTQWERPTAVP

SEQ ID NO: 673 - protein, 36 aa, Artificial Sequence
  Description of Artificial Sequence:  Synthetic Peptide
SPLPPGWEERQDVLGRTYYVNHESRRTQWKRPSPDD

SEQ ID NO: 674 - protein, 36 aa, Artificial Sequence
  Description of Artificial Sequence:  Synthetic Peptide
SPLPPGWEERQDVLGRTYYVNHESRTTQWKRPSPED

SEQ ID NO: 675 - protein, 36 aa, Artificial Sequence
  Description of Artificial Sequence:  Synthetic Peptide
SPLPPGWEERQDILGRTYYVNHESRRTQWKRPTPQD

SEQ ID NO: 676 - protein, 36 aa, Artificial Sequence
  Description of Artificial Sequence:  Synthetic Peptide
PPLPPGWEEKVDNLGRTYYVNHNNRSTQWHRPSLMD

SEQ ID NO: 677 - protein, 36 aa, Artificial Sequence
  Description of Artificial Sequence:  Synthetic Peptide
PPLPPGWEEKVDNLGRTYYVNHNNRTTQWHRPSLMD

SEQ ID NO: 678 - protein, 36 aa, Artificial Sequence
  Description of Artificial Sequence:  Synthetic Peptide
PPLPPGWEEKVDNLGRTYYVNHNNRTTQWHRPSLID

SEQ ID NO: 679 - protein, 36 aa, Artificial Sequence
  Description of Artificial Sequence:  Synthetic Peptide
PPMPPGWEEKVDNLGRTYYVNHNNKSTQWQRPSLID

SEQ ID NO: 680 - protein, 36 aa, Artificial Sequence
  Description of Artificial Sequence:  Synthetic Peptide
SGMPQGWEEREDGNGRTVYVNHALRTTQFTPPESVS

SEQ ID NO: 681 - protein, 36 aa, Artificial Sequence; identical to SEQ ID NO: 154
  Description of Artificial Sequence:  Synthetic Peptide

SEQ ID NO: 682 - protein, 36 aa, Artificial Sequence
  Description of Artificial Sequence:  Synthetic Peptide
DALPPGWEVRQDPVGRMYYVNHIARTTQWERPTIGP

SEQ ID NO: 683 - protein, 36 aa, Artificial Sequence
  Description of Artificial Sequence:  Synthetic Peptide
PGLPSGWEERKDAKGRTYYVNHNNRTTTWTRPIVQH

SEQ ID NO: 684 - protein, 36 aa, Artificial Sequence
  Description of Artificial Sequence:  Synthetic Peptide
PGLPSGWEERKDAKGRTYYVNHNNRTTTWTRPIMQL

SEQ ID NO: 685 - protein, 38 aa, Artificial Sequence
  Description of Artificial Sequence:  Synthetic Peptide
SYIIQSRSWEERKDAKGRTYYVNHNNRTTTWTRPIMQL

SEQ ID NO: 686 - protein, 36 aa, Artificial Sequence
  Description of Artificial Sequence:  Synthetic Peptide
GRLPAGWERREDNLGRTYYVDHNTRTTSWNRPTAAG

SEQ ID NO: 687 - protein, 36 aa, Artificial Sequence
  Description of Artificial Sequence:  Synthetic Peptide
GRLPAGWERREDHLGRTYYVDHNSRTTSWNRPTGTG

SEQ ID NO: 688 - protein, 36 aa, Artificial Sequence
  Description of Artificial Sequence:  Synthetic Peptide
GRLPAGWERREDNLGRTYYVDHNTRTTSWNRPTATG

SEQ ID NO: 689 - protein, 36 aa, Artificial Sequence; identical to SEQ ID NO: 151
  Description of Artificial Sequence:  Synthetic Peptide

SEQ ID NO: 690 - protein, 36 aa, Artificial Sequence
  Description of Artificial Sequence:  Synthetic Peptide
GRLPPGWERRTDNFGRTYYVDHNSRTTTWQRPALHQ

SEQ ID NO: 691 - protein, 36 aa, Artificial Sequence
  Description of Artificial Sequence:  Synthetic Peptide
GRLPPGWERRTDNFGRTYYVDHNTRTTTWKRPTLDQ

SEQ ID NO: 692 - protein, 36 aa, Artificial Sequence
  Description of Artificial Sequence:  Synthetic Peptide
GRLPPGWERRTDNLGRTYYVDHNTRSTTWIRPNLSS

SEQ ID NO: 693 - protein, 36 aa, Artificial Sequence
  Description of Artificial Sequence:  Synthetic Peptide
GRLPPGWERRADSLGRTYYVDHNTRTTTWTRPASST

SEQ ID NO: 694 - protein, 36 aa, Artificial Sequence
  Description of Artificial Sequence:  Synthetic Peptide
GPLPAGWERRTDHLGRTYYVDHNTRSTTWTRPSTNP

SEQ ID NO: 695 - protein, 34 aa, Artificial Sequence
  Description of Artificial Sequence:  Synthetic Peptide
ESLPSGWEQRKDPHGRTYYVDHNTRTTTWERPQP

SEQ ID NO: 696 - protein, 34 aa, Artificial Sequence
  Description of Artificial Sequence:  Synthetic Peptide
EALPSGWEQRKDPHGRTYYVDHNTRTTTWERPQP

SEQ ID NO: 697 - protein, 34 aa, Artificial Sequence; identical to SEQ ID NO: 696
  Description of Artificial Sequence:  Synthetic Peptide

SEQ ID NO: 698 - protein, 32 aa, Artificial Sequence
  Description of Artificial Sequence:  Synthetic Peptide
DALPAGWEQRELPNGRVYYVDHNTKTTTWERP

SEQ ID NO: 699 - protein, 36 aa, Artificial Sequence
  Description of Artificial Sequence:  Synthetic Peptide
ETLPEGWEMRFDQYGRKYYVDHTTKSTTWERPSTQP

SEQ ID NO: 700 - protein, 36 aa, Artificial Sequence
  Description of Artificial Sequence:  Synthetic Peptide
EQLPDGWEMRFDQYGRKYYVDHTTKSTTWERPSTQP

SEQ ID NO: 701 - protein, 34 aa, Artificial Sequence
  Description of Artificial Sequence:  Synthetic Peptide
EPLPAGWEMRVDKFGRRYYVDHNTRSTYWEKPQP

SEQ ID NO: 702 - protein, 34 aa, Artificial Sequence
  Description of Artificial Sequence:  Synthetic Peptide
EPLPAGWEIRLDQYGRRYYVDHNTRSTYWEKPTP

SEQ ID NO: 703 - protein, 34 aa, Artificial Sequence
  Description of Artificial Sequence:  Synthetic Peptide
APLPPGWEQRVDQHGRVYYVDHVEKRTTWDRPEP

SEQ ID NO: 704 - protein, 35 aa, Artificial Sequence
  Description of Artificial Sequence:  Synthetic Peptide
QPLPPGWERRVDDRRRVYYVDHNTRTTTWQRPTME

SEQ ID NO: 705 - protein, 35 aa, Artificial Sequence
  Description of Artificial Sequence:  Synthetic Peptide
QPLPPGWERRVDDRGRVYYVDHNTRTTTWQRPTME

SEQ ID NO: 706 - protein, 34 aa, Artificial Sequence
  Description of Artificial Sequence:  Synthetic Peptide
PLPPGWEKRTDPRGRFYYVDHNTRTTTWQRPTAE

SEQ ID NO: 707 - protein, 35 aa, Artificial Sequence
  Description of Artificial Sequence:  Synthetic Peptide
EPLPPGWERRVDNMGRIYYVDHFTRTTTWQRPTLE

SEQ ID NO: 708 - protein, 35 aa, Artificial Sequence
  Description of Artificial Sequence:  Synthetic Peptide
QPLPAGWEQRRDPRGRVYYVDHNTRTTTWQRPNSE

SEQ ID NO: 709 - protein, 35 aa, Artificial Sequence
  Description of Artificial Sequence:  Synthetic Peptide
TPLPPGWEIRKDGRGRVYYVDHNTRKTTWQRPNSE

SEQ ID NO: 710 - protein, 35 aa, Artificial Sequence
  Description of Artificial Sequence:  Synthetic Peptide
QPLPAGWEMRRDPRGRVYYVDHNTRTTTWQRPTAD

SEQ ID NO: 711 - protein, 35 aa, Artificial Sequence
  Description of Artificial Sequence:  Synthetic Peptide
QPLPQGWEMRRDPRGRVYYVDHNTRTTTWQRPTAD

SEQ ID NO: 712 - protein, 34 aa, Artificial Sequence
  Description of Artificial Sequence:  Synthetic Peptide
CGTACWERRVDDRGRVYYVDHNTRTTTWQRPTME

SEQ ID NO: 713 - protein, 36 aa, Artificial Sequence; identical to SEQ ID NO: 160
  Description of Artificial Sequence:  Synthetic Peptide

SEQ ID NO: 714 - protein, 36 aa, Artificial Sequence
  Description of Artificial Sequence:  Synthetic Peptide
PPLPPAWEARMDSHGRIFYIDHTTRTTSWQRPGAAP

SEQ ID NO: 715 - protein, 36 aa, Artificial Sequence
  Description of Artificial Sequence:  Synthetic Peptide
EPLPPNWEARIDSHGRVFYVDHVNRTTTWQRPSMAP

SEQ ID NO: 716 - protein, 36 aa, Artificial Sequence
  Description of Artificial Sequence:  Synthetic Peptide
EPLPPNWEARIDSHGRVFYVDHINRTTTWQRPSMAP

SEQ ID NO: 717 - protein, 36 aa, Artificial Sequence
  Description of Artificial Sequence:  Synthetic Peptide
EPLPPNWEARIDSHGRVFYVDHVNRTTTWQRPTAAA

SEQ ID NO: 718 - protein, 36 aa, Artificial Sequence
  Description of Artificial Sequence:  Synthetic Peptide
EALPPNWEARIDSHGRIFYVDHVNRTTTWQRPTAPP

SEQ ID NO: 719 - protein, 36 aa, Artificial Sequence
  Description of Artificial Sequence:  Synthetic Peptide
QGLPNGWEVRQDQFGRVFYVDHINRATTWTRPTVKH

SEQ ID NO: 720 - protein, 36 aa, Artificial Sequence; identical to SEQ ID NO: 153
  Description of Artificial Sequence:  Synthetic Peptide

SEQ ID NO: 721 - protein, 36 aa, Artificial Sequence
  Description of Artificial Sequence:  Synthetic Peptide
HQLPRGWEERSAQNGRTYYVNHYTKTTQWSRPTEPA

SEQ ID NO: 722 - protein, 36 aa, Artificial Sequence; identical to SEQ ID NO: 123
  Description of Artificial Sequence:  Synthetic Peptide

SEQ ID NO: 723 - protein, 36 aa, Artificial Sequence; identical to SEQ ID NO: 123
  Description of Artificial Sequence:  Synthetic Peptide

SEQ ID NO: 724 - protein, 36 aa, Artificial Sequence
  Description of Artificial Sequence:  Synthetic Peptide
GPLPPGWEKRTDSNGRVYFVNHNTRITQWEDPRSQG

SEQ ID NO: 725 - protein, 35 aa, Artificial Sequence
  Description of Artificial Sequence:  Synthetic Peptide
GPLPPGWEKRQDNGRVYYVNHNTRTTQWEDPRTQG

SEQ ID NO: 726 - protein, 37 aa, Artificial Sequence
  Description of Artificial Sequence:  Synthetic Peptide
GPLPEGWEKRQDPNTSRMYFVNHVNRTTQWEDPRTQG

SEQ ID NO: 727 - protein, 37 aa, Artificial Sequence; identical to SEQ ID NO: 726
  Description of Artificial Sequence:  Synthetic Peptide

SEQ ID NO: 728 - protein, 37 aa, Artificial Sequence
  Description of Artificial Sequence:  Synthetic Peptide
GPLPEGWEKRQDPNTGRMYFVNHVNRTTQWEDPRTQG

SEQ ID NO: 729 - protein, 36 aa, Artificial Sequence
  Description of Artificial Sequence:  Synthetic Peptide
GPLPDGWEKKIQSDNRVYFVNHKNRTTQWEDPRTQG

SEQ ID NO: 730 - protein, 36 aa, Artificial Sequence
  Description of Artificial Sequence:  Synthetic Peptide
GPLPDGWEKRVQPDNRVYFVNHKNRTTQWEDPRTQG

SEQ ID NO: 731 - protein, 34 aa, Artificial Sequence
  Description of Artificial Sequence:  Synthetic Peptide
SSSPVAEKRQDNGRVYYVNHNTRTTQWEDPRTQG

SEQ ID NO: 732 - protein, 37 aa, Artificial Sequence
  Description of Artificial Sequence:  Synthetic Peptide
ELVHAGWEKCWSRRESRPYYFNRFTNQSLWEMPVLGQ

SEQ ID NO: 733 - protein, 37 aa, Artificial Sequence
  Description of Artificial Sequence:  Synthetic Peptide
ELVHAGWEKCWSRRENRPYYFNRFTNQSLWEMPVLGQ

SEQ ID NO: 734 - protein, 37 aa, Artificial Sequence
  Description of Artificial Sequence:  Synthetic Peptide
ELTQQGWRKFWSKREGRPYFWNKLTGESLWEPPQLNR

SEQ ID NO: 735 - protein, 37 aa, Artificial Sequence
  Description of Artificial Sequence:  Synthetic Peptide
ELVNQGWRKFWSKRENRPYYWNKVTGESLWEMPGTRP

SEQ ID NO: 736 - protein, 37 aa, Artificial Sequence
  Description of Artificial Sequence:  Synthetic Peptide
TGLPTPYTVRYSKSKKREYFFNPETKHSQWEEPEGTN

SEQ ID NO: 737 - protein, 37 aa, Artificial Sequence
  Description of Artificial Sequence:  Synthetic Peptide
TGLPTPWTVRYSKSKKREYFFNPETKHSQWEEPEGTN

SEQ ID NO: 738 - protein, 37 aa, Artificial Sequence
  Description of Artificial Sequence:  Synthetic Peptide
NGLPGPWAVKFSKSRKREYYYNPETKESQWEVPADTD

SEQ ID NO: 739 - protein, 37 aa, Artificial Sequence
  Description of Artificial Sequence:  Synthetic Peptide
TGLPKPWIVKISRSRNRPYFFNTETHESLWEPPAATD

SEQ ID NO: 740 - protein, 37 aa, Artificial Sequence
  Description of Artificial Sequence:  Synthetic Peptide
TGLPSGWEVRHSNSKNLPYYFNPITKESRWEPPSNTD

SEQ ID NO: 741 - protein, 37 aa, Artificial Sequence
  Description of Artificial Sequence:  Synthetic Peptide
TGLPPGWEVRHSNSKNLPYYFNSAEKLSRWEPPSGTD

SEQ ID NO: 742 - protein, 37 aa, Artificial Sequence; identical to SEQ ID NO: 155
  Description of Artificial Sequence:  Synthetic Peptide

SEQ ID NO: 743 - protein, 37 aa, Artificial Sequence
  Description of Artificial Sequence:  Synthetic Peptide
TGLPAGWEVRHSNSKNLPYYFNPATRESRWEPPADTD

SEQ ID NO: 744 - protein, 37 aa, Artificial Sequence
  Description of Artificial Sequence:  Synthetic Peptide
TGLPPNWEVRLSKSKNLPYYFNTSNTTSRWEPPPGTD

SEQ ID NO: 745 - protein, 37 aa, Artificial Sequence
  Description of Artificial Sequence:  Synthetic Peptide
TGLPPNWTIRVSRSHNKEYFLNQSTNESSWDPPYGTD

SEQ ID NO: 746 - protein, 36 aa, Artificial Sequence
  Description of Artificial Sequence:  Synthetic Peptide
MSSTGWEIRFSNSRQIPYFYNSERSISTWEPPSELS

SEQ ID NO: 747 - protein, 37 aa, Artificial Sequence
  Description of Artificial Sequence:  Synthetic Peptide
NSLPPGWEKRQSRTNDRVYYFNTATGQSQWERPEHTA

SEQ ID NO: 748 - protein, 37 aa, Artificial Sequence
  Description of Artificial Sequence:  Synthetic Peptide
NSLPAGWEKRQSRSNDRVYYFNTATGRSQWERPDESA

SEQ ID NO: 749 - protein, 37 aa, Artificial Sequence; identical to SEQ ID NO: 130
  Description of Artificial Sequence:  Synthetic Peptide

SEQ ID NO: 750 - protein, 37 aa, Artificial Sequence
  Description of Artificial Sequence:  Synthetic Peptide
EKLPPGWEKRMSRPSGRGYYFNHITNPSQWERPSGNS

SEQ ID NO: 751 - protein, 37 aa, Artificial Sequence
  Description of Artificial Sequence:  Synthetic Peptide
EKLPPGWEKRMSRSSGRVYYFNHMTNASQWERPIAGG

SEQ ID NO: 752 - protein, 37 aa, Artificial Sequence
  Description of Artificial Sequence:  Synthetic Peptide
EKLPSGWEKRMSRSSGRVYYFNHITNASQWERPSGSG

SEQ ID NO: 753 - protein, 37 aa, Artificial Sequence
  Description of Artificial Sequence:  Synthetic Peptide
EKLPPGWKKYMSRSSGREYYFNHITNASQWERPSEGS

SEQ ID NO: 754 - protein, 37 aa, Artificial Sequence
  Description of Artificial Sequence:  Synthetic Peptide
EQLPDGWEKRTSRSTGMSYYLNMYTKESQWDQPTEPA

SEQ ID NO: 755 - protein, 37 aa, Artificial Sequence
  Description of Artificial Sequence:  Synthetic Peptide
ETVPEGWEKRTSRSTGMTYYLNVYTKESQWDPPTAPA

SEQ ID NO: 756 - protein, 37 aa, Artificial Sequence
  Description of Artificial Sequence:  Synthetic Peptide
PTLPKPWKGLVDGTTGFIYFWNPETNDTQYERPVPSS

SEQ ID NO: 757 - protein, 37 aa, Artificial Sequence; identical to SEQ ID NO: 147
  Description of Artificial Sequence:  Synthetic Peptide

SEQ ID NO: 758 - protein, 37 aa, Artificial Sequence
  Description of Artificial Sequence:  Synthetic Peptide
HTLPKPWKGLIDDRTGYLYFWNPETNVTQYEKPTPSL

SEQ ID NO: 759 - protein, 37 aa, Artificial Sequence
  Description of Artificial Sequence:  Synthetic Peptide
PNLPKPWKGLVDSRTGYLYFWNPETNVTQYERPASSA

SEQ ID NO: 760 - protein, 35 aa, Artificial Sequence
  Description of Artificial Sequence:  Synthetic Peptide
FLKPWKGLVDGKTGYLYFWNPETNVTQYERPLSSA

SEQ ID NO: 761 - protein, 37 aa, Artificial Sequence
  Description of Artificial Sequence:  Synthetic Peptide
PSLPKPWRGLVDGTTGYLYYWNPETNITQYEKPLPPE

SEQ ID NO: 762 - protein, 37 aa, Artificial Sequence
  Description of Artificial Sequence:  Synthetic Peptide
PTLPKPWRGLIDGNTGYLYFWNPETKAVQYDRPTAPP

SEQ ID NO: 763 - protein, 38 aa, Artificial Sequence
  Description of Artificial Sequence:  Synthetic Peptide
VEIEMGDWQEVWDENTGCYYYWNTQTNEVTWELPQYLA

SEQ ID NO: 764 - protein, 38 aa, Artificial Sequence
  Description of Artificial Sequence:  Synthetic Peptide
AGLEMGDWQEVWDENTGCYYYWNTQTNEVAWELPHYLA

SEQ ID NO: 765 - protein, 37 aa, Artificial Sequence
  Description of Artificial Sequence:  Synthetic Peptide
EGLPPSWYKVFDPSCGLPYYWNVETDLVSWLSPHDPN

SEQ ID NO: 766 - protein, 37 aa, Artificial Sequence; identical to SEQ ID NO: 131
  Description of Artificial Sequence:  Synthetic Peptide

SEQ ID NO: 767 - protein, 38 aa, Artificial Sequence
  Description of Artificial Sequence:  Synthetic Peptide
AGLPPSCYKVFDLSCGLPCYRNVEKDLFLSWLSSHDHT

SEQ ID NO: 768 - protein, 37 aa, Artificial Sequence
  Description of Artificial Sequence:  Synthetic Peptide
ESLPSNWYKVFDSACGLPYYWNVETDLVSWLSPNDPA

SEQ ID NO: 769 - protein, 39 aa, Artificial Sequence
  Description of Artificial Sequence:  Synthetic Peptide
PPVLSKEEWIETFDEASGHKYFYNTRTHVSQWEPPASLQ

SEQ ID NO: 770 - protein, 37 aa, Artificial Sequence
  Description of Artificial Sequence:  Synthetic Peptide
STLPLGWVDAKDPASGATYYYNQHTGTCQWERPVELS

SEQ ID NO: 771 - protein, 37 aa, Artificial Sequence
  Description of Artificial Sequence:  Synthetic Peptide
QELPPGWVEAKDPTSGASYFYNQSTGTTQWDRPGAPL

SEQ ID NO: 772 - protein, 37 aa, Artificial Sequence
  Description of Artificial Sequence:  Synthetic Peptide
SSLPENWEEALDQSTGQKYYYNTNTQATQWEPPTAVN

SEQ ID NO: 773 - protein, 37 aa, Artificial Sequence
  Description of Artificial Sequence:  Synthetic Peptide
NATPKGWSCHWDRDHRRYFYVNEQSGESQWEFPDGEE

SEQ ID NO: 774 - protein, 37 aa, Artificial Sequence
  Description of Artificial Sequence:  Synthetic Peptide
NATPKGWSCHWDREHRRYFYMNERTSASQWEFPVGGE

SEQ ID NO: 775 - protein, 37 aa, Artificial Sequence
  Description of Artificial Sequence:  Synthetic Peptide
PKLPPGWKARWDEEYQTFFYINERTGETQWELPTEDA

SEQ ID NO: 776 - protein, 37 aa, Artificial Sequence
  Description of Artificial Sequence:  Synthetic Peptide
PTVPEGWKAVFDEEYKTWFYVDLKSRKSQWEAPAGTS

SEQ ID NO: 777 - protein, 37 aa, Artificial Sequence
  Description of Artificial Sequence:  Synthetic Peptide
PQVPSGWKAVFDDEYQTWYYVDLSTNSSQWEPPRGTT

SEQ ID NO: 778 - protein, 37 aa, Artificial Sequence
  Description of Artificial Sequence:  Synthetic Peptide
PQVPDGWVAKFDEEYSTWYYVDLKTKKSQWDAPAGTR

SEQ ID NO: 779 - protein, 53 aa, Artificial Sequence
  Description of Artificial Sequence:  Synthetic Peptide
PKVPEGWVARWNEQYKECDRPTIKRIITNTILTRFYVNTYTKKSQWEKPTEPA

SEQ ID NO: 780 - protein, 37 aa, Artificial Sequence
  Description of Artificial Sequence:  Synthetic Peptide
PKVPEGWIAKWNDQYKEWYYVNIHTKKSQWDKPDAPA

SEQ ID NO: 781 - protein, 37 aa, Artificial Sequence
  Description of Artificial Sequence:  Synthetic Peptide
PPLPSGWTPKWDDEYQRWYYLEEATGRSQWEAPGFER

SEQ ID NO: 782 - protein, 37 aa, Artificial Sequence
  Description of Artificial Sequence:  Synthetic Peptide
PPLPAGWIAQWDNASKKYYYVQLSTGVSQWETPTDPA

SEQ ID NO: 783 - protein, 37 aa, Artificial Sequence
  Description of Artificial Sequence:  Synthetic Peptide
PPLPAGWIAQWDGTSKKYYYVQLSTGVSQWDVPTEPA

SEQ ID NO: 784 - protein, 37 aa, Artificial Sequence; identical to SEQ ID NO: 159
  Description of Artificial Sequence:  Synthetic Peptide

SEQ ID NO: 785 - protein, 37 aa, Artificial Sequence
  Description of Artificial Sequence:  Synthetic Peptide
PPLPEGWIAHLDQNSGQYYYIHLATQATQWEFPKGPN

SEQ ID NO: 786 - protein, 37 aa, Artificial Sequence
  Description of Artificial Sequence:  Synthetic Peptide
PPLPEGWISHLDQNSGQYYYIHLATQATQWEFPKGPN

SEQ ID NO: 787 - protein, 35 aa, Artificial Sequence
  Description of Artificial Sequence:  Synthetic Peptide
TNLPAGWFVTTDSTGKYYFYDKSGHTQWQRPTTPA

SEQ ID NO: 788 - protein, 35 aa, Artificial Sequence
  Description of Artificial Sequence:  Synthetic Peptide
ASLPQGWFTAKDAAGNTYFYTKQGATTWQRPTQPA

SEQ ID NO: 789 - protein, 36 aa, Artificial Sequence
  Description of Artificial Sequence:  Synthetic Peptide
NDLPDGWEERRTASGRIQYLNHITRTTQWERPTRPA

SEQ ID NO: 790 - protein, 36 aa, Artificial Sequence
  Description of Artificial Sequence:  Synthetic Peptide
VILPPGWHSYLSPQGRRYYVNTTTNETTWERPSSSP

SEQ ID NO: 791 - protein, 36 aa, Artificial Sequence
  Description of Artificial Sequence:  Synthetic Peptide
VILPPGWQSYLSPQGRRYYVNTTTNETTWERPSSFP

SEQ ID NO: 792 - protein, 36 aa, Artificial Sequence
  Description of Artificial Sequence:  Synthetic Peptide
VILPPGWQSYLSPQGRRYYVNTTTNETTWERPSSSP

SEQ ID NO: 793 - protein, 37 aa, Artificial Sequence
  Description of Artificial Sequence:  Synthetic Peptide
VGLPPGWDCKYDSRTGRYYYVNLFTKTTQWEDPRARI

SEQ ID NO: 794 - protein, 36 aa, Artificial Sequence
  Description of Artificial Sequence:  Synthetic Peptide
QPLPPGWTEHKAPTGHTYYHNAATGESTYKRPAAAG

SEQ ID NO: 795 - protein, 35 aa, Artificial Sequence
  Description of Artificial Sequence:  Synthetic Peptide
PLPPGWSEHTAPTGHTYYYNEGTKESTYKRPGVQP

SEQ ID NO: 796 - protein, 37 aa, Artificial Sequence
  Description of Artificial Sequence:  Synthetic Peptide
AGLPENWRSAFDKNTGGYYYYNLVTKETTWERPLGSL

SEQ ID NO: 797 - protein, 37 aa, Artificial Sequence
  Description of Artificial Sequence:  Synthetic Peptide
RTLPPGWEERFDSVTGKSFYIDHNTRTTTWEHPCQEA

SEQ ID NO: 798 - protein, 37 aa, Artificial Sequence
  Description of Artificial Sequence:  Synthetic Peptide
APLPPGWEKRADAVTGKSYYIDHNTKTTTWSHPCPDK

SEQ ID NO: 799 - protein, 36 aa, Artificial Sequence
  Description of Artificial Sequence:  Synthetic Peptide
GPLPPKWETAYTERGELYFIDHNTGTSHWLDPRLSK

SEQ ID NO: 800 - protein, 36 aa, Artificial Sequence
  Description of Artificial Sequence:  Synthetic Peptide
GPLPPKWEKAFTDSGEVYFIDHNTGTSHWLDPRLSK

SEQ ID NO: 801 - protein, 36 aa, Artificial Sequence
  Description of Artificial Sequence:  Synthetic Peptide
EPLPKNWEMAYTDTGMIYFIDHNTKTTTWLDPRLCK

SEQ ID NO: 802 - protein, 36 aa, Artificial Sequence; identical to SEQ ID NO: 135
  Description of Artificial Sequence:  Synthetic Peptide

SEQ ID NO: 803 - protein, 36 aa, Artificial Sequence
  Description of Artificial Sequence:  Synthetic Peptide
GPLPENWEMAYTENGEVYFIDHNTKTTSWLDPRCLN

SEQ ID NO: 804 - protein, 36 aa, Artificial Sequence
  Description of Artificial Sequence:  Synthetic Peptide
GFLPENWEMAYTENGEVYFIDHNTKTTSWLDPRCLN

SEQ ID NO: 805 - protein, 35 aa, Artificial Sequence
  Description of Artificial Sequence:  Synthetic Peptide
DPLPDNWEMAYTEKGEVYFIDHNTKTTSWLDPRLA

SEQ ID NO: 806 - protein, 36 aa, Artificial Sequence
  Description of Artificial Sequence:  Synthetic Peptide
GLLPPNWETAYTENGDKYFIDHNTGTTTWDDPRELP

SEQ ID NO: 807 - protein, 36 aa, Artificial Sequence; identical to SEQ ID NO: 806
  Description of Artificial Sequence:  Synthetic Peptide

SEQ ID NO: 808 - protein, 36 aa, Artificial Sequence
  Description of Artificial Sequence:  Synthetic Peptide
VQLPPGWQMAYSVEGEVYYIDHNTRTTHWKIPQEVL

SEQ ID NO: 809 - protein, 33 aa, Artificial Sequence
  Description of Artificial Sequence:  Synthetic Peptide
PPGWSVDWTMRGRKYYIDHNTNTTHWSHPLERE

SEQ ID NO: 810 - protein, 33 aa, Artificial Sequence; identical to SEQ ID NO: 809
  Description of Artificial Sequence:  Synthetic Peptide

SEQ ID NO: 811 - protein, 36 aa, Artificial Sequence; identical to SEQ ID NO: 137
  Description of Artificial Sequence:  Synthetic Peptide

SEQ ID NO: 812 - protein, 36 aa, Artificial Sequence
  Description of Artificial Sequence:  Synthetic Peptide
LPLPPGWATQYTLHGRKYYIDHNAHTTHWNHPLERE

SEQ ID NO: 813 - protein, 33 aa, Artificial Sequence
  Description of Artificial Sequence:  Synthetic Peptide
PPGWATQYTLHGRKYYIDHNAHTTHWNHPLERE

SEQ ID NO: 814 - protein, 36 aa, Artificial Sequence
  Description of Artificial Sequence:  Synthetic Peptide
LMLPPGWSVDYTLRGRKYYIDHNTKTTHWAHPLDRK

SEQ ID NO: 815 - protein, 36 aa, Artificial Sequence
  Description of Artificial Sequence:  Synthetic Peptide
LPLPENWAVEYTTENQPYYVDHTNRRTHWVHPLVHE

SEQ ID NO: 816 - protein, 36 aa, Artificial Sequence
  Description of Artificial Sequence:  Synthetic Peptide
IPLPENWAVEFTTENQPYYVDHANRRTHWVHPFVHE

SEQ ID NO: 817 - protein, 33 aa, Artificial Sequence
  Description of Artificial Sequence:  Synthetic Peptide
PENWAVEFTTENQPYYVDHANRRTHWVHPFVHE

SEQ ID NO: 818 - protein, 33 aa, Artificial Sequence
  Description of Artificial Sequence:  Synthetic Peptide
PENWAVEYTTENQPYYVDHTNRRTHWVHPLVHE

SEQ ID NO: 819 - protein, 36 aa, Artificial Sequence; identical to SEQ ID NO: 144
  Description of Artificial Sequence:  Synthetic Peptide

SEQ ID NO: 820 - protein, 37 aa, Artificial Sequence
  Description of Artificial Sequence:  Synthetic Peptide
EPLPPGWEMRYDEKSGQFYFVDHNTRSTQWEHPLANQ

SEQ ID NO: 821 - protein, 36 aa, Artificial Sequence
  Description of Artificial Sequence:  Synthetic Peptide
NDLPFGWEMRYTDTGRPYFVDHNTRTTTWVDPRNPL

SEQ ID NO: 822 - protein, 36 aa, Artificial Sequence
  Description of Artificial Sequence:  Synthetic Peptide
GELPAGWEQRFTPEGRPYFVDHNTRTTTWVDPRRQQ

SEQ ID NO: 823 - protein, 36 aa, Artificial Sequence
  Description of Artificial Sequence:  Synthetic Peptide
GELPPGWEQRFTPEGRPYFVDHNTRTTTWVDPRRQQ

SEQ ID NO: 824 - protein, 36 aa, Artificial Sequence
  Description of Artificial Sequence:  Synthetic Peptide
GELPPGWEQRWTPEGRPYFVDHNTRTTTWVDPRRQQ

SEQ ID NO: 825 - protein, 36 aa, Artificial Sequence
  Description of Artificial Sequence:  Synthetic Peptide
GELPPGWEQRTTPEGRPYFVDHNTRTTTWVDPRRQQ

SEQ ID NO: 826 - protein, 36 aa, Artificial Sequence
  Description of Artificial Sequence:  Synthetic Peptide
GELPPGWEQRYTPEGRPYFVDHNTRTTTWVDPRRQQ

SEQ ID NO: 827 - protein, 36 aa, Artificial Sequence
  Description of Artificial Sequence:  Synthetic Peptide
GELPPGWEQRYTPEGRAYFVDHNTRTTTWVDPRRQQ

SEQ ID NO: 828 - protein, 36 aa, Artificial Sequence
  Description of Artificial Sequence:  Synthetic Peptide
GELPSGWEQRFTPEGRAYFVDHNTRTTTWVDPRRQQ

SEQ ID NO: 829 - protein, 36 aa, Artificial Sequence
  Description of Artificial Sequence:  Synthetic Peptide
GELPSGWEQRFTTEGRPYFVDHNTRTTTWVDPRRQQ

SEQ ID NO: 830 - protein, 36 aa, Artificial Sequence
  Description of Artificial Sequence:  Synthetic Peptide
GPLPAGWEQRHTPEGRPYFVDHNTRTTTWVDPRRQQ

SEQ ID NO: 831 - protein, 37 aa, Artificial Sequence
  Description of Artificial Sequence:  Synthetic Peptide
DPLPPGWEIKIDPQTGWPFFVDHNSRTTTWNDPRVPP

SEQ ID NO: 832 - protein, 37 aa, Artificial Sequence
  Description of Artificial Sequence:  Synthetic Peptide
DPLPPGWEIKIDPQTGWPFFVDHNSRTTTWNDPRVPS

SEQ ID NO: 833 - protein, 37 aa, Artificial Sequence
  Description of Artificial Sequence:  Synthetic Peptide
QPLPPGWEMKLDPHTGWSFFVDHNNRSTTWTDPRLQD

SEQ ID NO: 834 - protein, 36 aa, Artificial Sequence; identical to SEQ ID NO: 126
  Description of Artificial Sequence:  Synthetic Peptide

SEQ ID NO: 835 - protein, 36 aa, Artificial Sequence
  Description of Artificial Sequence:  Synthetic Peptide
SGLPPGWEEKQDERGRSYYVDHNSRTTTWTKPAVQA

SEQ ID NO: 836 - protein, 36 aa, Artificial Sequence
  Description of Artificial Sequence:  Synthetic Peptide
SGLPPGWEEKQDDRGRSYYVDHNSKTTTWSKPTMQD

SEQ ID NO: 837 - protein, 36 aa, Artificial Sequence
  Description of Artificial Sequence:  Synthetic Peptide
GFLPKGWEVRHAPNGSPFFIDHNTKTTTWEDPRLKI

SEQ ID NO: 838 - protein, 36 aa, Artificial Sequence
  Description of Artificial Sequence:  Synthetic Peptide
GFLPKGWEVRHAPNGRPFFIDHNTKTTTWEDPRLKI

SEQ ID NO: 839 - protein, 36 aa, Artificial Sequence
  Description of Artificial Sequence:  Synthetic Peptide
SFLPPGWEMRIAPNGRPFFIDHNTKTTTWEDPRLKF

SEQ ID NO: 840 - protein, 36 aa, Artificial Sequence
  Description of Artificial Sequence:  Synthetic Peptide
MTLPAGWSMQLAPNGRVFFIDHNERKTSWVDPRTGR

SEQ ID NO: 841 - protein, 36 aa, Artificial Sequence
  Description of Artificial Sequence:  Synthetic Peptide
EPLPPRWSMQVAPNGRTFFIDHASRRTTWIDPRNGR

SEQ ID NO: 842 - protein, 36 aa, Artificial Sequence
  Description of Artificial Sequence:  Synthetic Peptide
TGLPPGWAVQVASNGRLFFIDHINKTTSWVDPRTGL

SEQ ID NO: 843 - protein, 36 aa, Artificial Sequence
  Description of Artificial Sequence:  Synthetic Peptide
LRLPDGWDMQVAPNGRTFFIDHRTKTTTWTDPRPGA

SEQ ID NO: 844 - protein, 36 aa, Artificial Sequence
  Description of Artificial Sequence:  Synthetic Peptide
LRLPDGWDMQVAPNGRTFFIDHRTKTTTWTDPRTGI

SEQ ID NO: 845 - protein, 36 aa, Artificial Sequence
  Description of Artificial Sequence:  Synthetic Peptide
RELPSCWETKLDQSGKQFFIDHQHRRTSFMDPRLPV

SEQ ID NO: 846 - protein, 36 aa, Artificial Sequence
  Description of Artificial Sequence:  Synthetic Peptide
QELPSGWETKLDQSGKQFFIDHVNRRTSFIDPRLPT

SEQ ID NO: 847 - protein, 36 aa, Artificial Sequence
  Description of Artificial Sequence:  Synthetic Peptide
LELPRGWEMKHDHQGKAFFVDHNSRTTTFIDPRLPL

SEQ ID NO: 848 - protein, 37 aa, Artificial Sequence
  Description of Artificial Sequence:  Synthetic Peptide
LELPRGWEMKHDHQGKVTGVSHPRVVNTSLIPKQEFR

SEQ ID NO: 849 - protein, 36 aa, Artificial Sequence
  Description of Artificial Sequence:  Synthetic Peptide
LELPRGWEIKTDHQGKSFFVDHNSRATTFIDPRIPL

SEQ ID NO: 850 - protein, 36 aa, Artificial Sequence
  Description of Artificial Sequence:  Synthetic Peptide
LELPRGWEIKTDHQGKSFFVGHNSRATTFIDPRIPL

SEQ ID NO: 851 - protein, 36 aa, Artificial Sequence
  Description of Artificial Sequence:  Synthetic Peptide
LELPRGWEIKTDQQGKSFFVDHNSRATTFIDPRIPL

SEQ ID NO: 852 - protein, 36 aa, Artificial Sequence
  Description of Artificial Sequence:  Synthetic Peptide
LPMPQGWEMCYDSDGVRYFKDHNSKTTTWDDPRLKQ

SEQ ID NO: 853 - protein, 36 aa, Artificial Sequence
  Description of Artificial Sequence:  Synthetic Peptide
LPMPHGWEICYDSEGHRYYKDHNSKTTTWNDPRLIP

SEQ ID NO: 854 - protein, 36 aa, Artificial Sequence
  Description of Artificial Sequence:  Synthetic Peptide
LPLPAGWEEARDYDGRVFYIDHNTRQTSWIDPRDRI

SEQ ID NO: 855 - protein, 36 aa, Artificial Sequence
  Description of Artificial Sequence:  Synthetic Peptide
LPLPRGWEEARDYDGKVFYIDHNTRRTSWIDPRDRL

SEQ ID NO: 856 - protein, 36 aa, Artificial Sequence
  Description of Artificial Sequence:  Synthetic Peptide
LPLPEGWEEARDFDGKVYYIDHTNRTTSWIDPRDRY

SEQ ID NO: 857 - protein, 36 aa, Artificial Sequence
  Description of Artificial Sequence:  Synthetic Peptide
LPLPEGWEEARDFDGKVYYIDHRNRTTSWIDPRDRN

SEQ ID NO: 858 - protein, 36 aa, Artificial Sequence
  Description of Artificial Sequence:  Synthetic Peptide
GPLPDGWEQAMTQDGEIYYINHKNKTTSWLDPRLDP

SEQ ID NO: 859 - protein, 36 aa, Artificial Sequence
  Description of Artificial Sequence:  Synthetic Peptide
GPLPDGWEQAMTQDGEVYYINHKNKTTSWLDPRLDP

SEQ ID NO: 860 - protein, 36 aa, Artificial Sequence
  Description of Artificial Sequence:  Synthetic Peptide
GPLPPGWEIRYTANGERFFVDHNNRKTTFEDPRPGA

SEQ ID NO: 861 - protein, 36 aa, Artificial Sequence
  Description of Artificial Sequence:  Synthetic Peptide
GPLPPGWEIRYTAAGERFFVDHNTRRTTFEDPRPGA

SEQ ID NO: 862 - protein, 36 aa, Artificial Sequence
  Description of Artificial Sequence:  Synthetic Peptide
PALPPGWEMKYTSEGVRYFVDHNTRTTTFKDPRPGF

SEQ ID NO: 863 - protein, 36 aa, Artificial Sequence
  Description of Artificial Sequence:  Synthetic Peptide
KPLPEGWEMRFTVDGIPYFVDHNRRTTTYIDPRTGK

SEQ ID NO: 864 - protein, 36 aa, Artificial Sequence; identical to SEQ ID NO: 143
  Description of Artificial Sequence:  Synthetic Peptide

SEQ ID NO: 865 - protein, 36 aa, Artificial Sequence
  Description of Artificial Sequence:  Synthetic Peptide
EPLPEGWEIRYTREGVRYFVDHNTRTTTFKDPRNGK

SEQ ID NO: 866 - protein, 36 aa, Artificial Sequence
  Description of Artificial Sequence:  Synthetic Peptide
QPLPDGWEMRFTEQGVPFFIDHQSKTTTYNDPRTGK

SEQ ID NO: 867 - protein, 36 aa, Artificial Sequence
  Description of Artificial Sequence:  Synthetic Peptide
QPLPDGWEMRFTEQGVPFFIDHHSKTTTYNDPRTGK

SEQ ID NO: 868 - protein, 36 aa, Artificial Sequence
  Description of Artificial Sequence:  Synthetic Peptide
GPLPHGWEQRKTASGRVYFVDHNNRTTQFTDPRINM

SEQ ID NO: 869 - protein, 36 aa, Artificial Sequence
  Description of Artificial Sequence:  Synthetic Peptide
GPLPSGWEQRKTASGRVYFVDHNNRTTQFTDPRLSG

SEQ ID NO: 870 - protein, 36 aa, Artificial Sequence
  Description of Artificial Sequence:  Synthetic Peptide
GPLPPGWEVRSTVSGRIYFVDHNNRTTQFTDPRLHH

SEQ ID NO: 871 - protein, 36 aa, Artificial Sequence
  Description of Artificial Sequence:  Synthetic Peptide
GSLPAGWEVRTTVSGRIYFVDHNNRTTQFTDPRLHH

SEQ ID NO: 872 - protein, 36 aa, Artificial Sequence
  Description of Artificial Sequence:  Synthetic Peptide
GPLPPGREIRSTVSGRIYFVDHNNRTTQFTDPRLHH

SEQ ID NO: 873 - protein, 36 aa, Artificial Sequence; identical to SEQ ID NO: 128
  Description of Artificial Sequence:  Synthetic Peptide

SEQ ID NO: 874 - protein, 36 aa, Artificial Sequence
  Description of Artificial Sequence:  Synthetic Peptide
GPLPSGWEMRLTNTARVYFVDHNTKTTTWDDPRLPS

SEQ ID NO: 875 - protein, 36 aa, Artificial Sequence
  Description of Artificial Sequence:  Synthetic Peptide
GPLPSGWEMRLTSTARVYFVDHNTKTTTWDDPRLPS

SEQ ID NO: 876 - protein, 36 aa, Artificial Sequence
  Description of Artificial Sequence:  Synthetic Peptide
GPLPSGWEMRLTNSARVYFVDHNTKTTTWDDPRLPS

SEQ ID NO: 877 - protein, 36 aa, Artificial Sequence
  Description of Artificial Sequence:  Synthetic Peptide
APLPEGWEERVHSDGRIFFIDHNTRTTQWEDPRLSI

SEQ ID NO: 878 - protein, 36 aa, Artificial Sequence
  Description of Artificial Sequence:  Synthetic Peptide
GPLPEGWEERVHSDGRTFFIDHNTRTTQWDDPRLSN

SEQ ID NO: 879 - protein, 36 aa, Artificial Sequence
  Description of Artificial Sequence:  Synthetic Peptide
GPLPEGWEERVHTDGRVFYIDHNTRTTQWEDPRLSN

SEQ ID NO: 880 - protein, 36 aa, Artificial Sequence
  Description of Artificial Sequence:  Synthetic Peptide
GALPPGWEQRVHVDGRVFFIDHNRRRTQWEDPRFEN

SEQ ID NO: 881 - protein, 36 aa, Artificial Sequence
  Description of Artificial Sequence:  Synthetic Peptide
GALPAGWEQRVHADGRVFFIDHNRRRTQWEDPRFEN

SEQ ID NO: 882 - protein, 36 aa, Artificial Sequence
  Description of Artificial Sequence:  Synthetic Peptide
GPLPPGWEERTHTDGRVFFINHNIKKTQWEDPRLQN

SEQ ID NO: 883 - protein, 36 aa, Artificial Sequence
  Description of Artificial Sequence:  Synthetic Peptide
GPLPPGWEERTHTDGRVFFINHNIKKTQWEDPRMQN

SEQ ID NO: 884 - protein, 36 aa, Artificial Sequence; identical to SEQ ID NO: 133
  Description of Artificial Sequence:  Synthetic Peptide

SEQ ID NO: 885 - protein, 36 aa, Artificial Sequence
  Description of Artificial Sequence:  Synthetic Peptide
GPLPPGWEERTHTDGRIFYINHNIKKTQWEDPRLQN

SEQ ID NO: 886 - protein, 36 aa, Artificial Sequence
  Description of Artificial Sequence:  Synthetic Peptide
GPLPPGWEERIHLDGRTFYIDHNSKITQWEDPRLQN

SEQ ID NO: 887 - protein, 36 aa, Artificial Sequence
  Description of Artificial Sequence:  Synthetic Peptide
GPLPPGWEGRIHLDGRTFYIDHNSKITQWEDPRLQN

SEQ ID NO: 888 - protein, 36 aa, Artificial Sequence; identical to SEQ ID NO: 101
  Description of Artificial Sequence:  Synthetic Peptide

SEQ ID NO: 889 - protein, 36 aa, Artificial Sequence; identical to SEQ ID NO: 150
  Description of Artificial Sequence:  Synthetic Peptide

SEQ ID NO: 890 - protein, 36 aa, Artificial Sequence
  Description of Artificial Sequence:  Synthetic Peptide
DELPWGWEAGFDPQIGAYYIDHINKTTQIEDPRKQW

SEQ ID NO: 891 - protein, 36 aa, Artificial Sequence
  Description of Artificial Sequence:  Synthetic Peptide
DELPLGWETVYDKQIGIYYMDHINKLTQIEDPREQW

SEQ ID NO: 892 - protein, 36 aa, Artificial Sequence
  Description of Artificial Sequence:  Synthetic Peptide
DELPLGWEEAYDPQVGDYFIDHNTKTTQIEDPRVQW

SEQ ID NO: 893 - protein, 36 aa, Artificial Sequence
  Description of Artificial Sequence:  Synthetic Peptide
DELPMGWEESYDPNIGPYYINHLAQSTQLEDPRQEW

SEQ ID NO: 894 - protein, 36 aa, Artificial Sequence
  Description of Artificial Sequence:  Synthetic Peptide
NELPFGWEESYDPQIGTYYINHNTQTTQLEDPRLQW

SEQ ID NO: 895 - protein, 36 aa, Artificial Sequence; identical to SEQ ID NO: 129
  Description of Artificial Sequence:  Synthetic Peptide

SEQ ID NO: 896 - protein, 61 aa, Artificial Sequence
  Description of Artificial Sequence:  Synthetic Peptide
GELPYGWEKIEDPQYGTYYVDFTLVAQAGVQWHDLGSLQPPPPGFNHLNQKTQFENPVEEA

SEQ ID NO: 897 - protein, 36 aa, Artificial Sequence
  Description of Artificial Sequence:  Synthetic Peptide
NELPYGWEKIDDPIYGTYYVDHINRRTQFENPVLEA

SEQ ID NO: 898 - protein, 36 aa, Artificial Sequence
  Description of Artificial Sequence:  Synthetic Peptide
LELPAGWEKIEDPVYGIYYVDHINRKTQYENPVLEA

SEQ ID NO: 899 - protein, 36 aa, Artificial Sequence
  Description of Artificial Sequence:  Synthetic Peptide
DELPAGWEKIEDPVYGVYYVDHINRKTQYENPVLEA

SEQ ID NO: 900 - protein, 36 aa, Artificial Sequence
  Description of Artificial Sequence:  Synthetic Peptide
DELPYGWEKICDPHYGTYYIDHVNRKTQYENPVLQA

SEQ ID NO: 901 - protein, 36 aa, Artificial Sequence
  Description of Artificial Sequence:  Synthetic Peptide
DELPYGWEKIEDSMYGMYFIDHVNRRTQYENPVLEA

SEQ ID NO: 902 - protein, 36 aa, Artificial Sequence
  Description of Artificial Sequence:  Synthetic Peptide
LELPAGWEKIEDPVYGVYYVDHINRKTQYENPVLEA

SEQ ID NO: 903 - protein, 36 aa, Artificial Sequence
  Description of Artificial Sequence:  Synthetic Peptide
GDLPYGWEQETDENGQVFFVDHINKRTTYLDPRLAF

SEQ ID NO: 904 - protein, 36 aa, Artificial Sequence
  Description of Artificial Sequence:  Synthetic Peptide
GALPYGWEQETDDKGQIFYVDHINKRKTYFDPRQAF

SEQ ID NO: 905 - protein, 37 aa, Artificial Sequence
  Description of Artificial Sequence:  Synthetic Peptide
GELPIGWTRQIEEDTRKVIFVEEKTQRKSYTDPRLAF

SEQ ID NO: 906 - protein, 36 aa, Artificial Sequence
  Description of Artificial Sequence:  Synthetic Peptide
LGLPYGWEQAKDNDGNTYYIDHLNRATTYTDPRKTR

SEQ ID NO: 907 - protein, 36 aa, Artificial Sequence
  Description of Artificial Sequence:  Synthetic Peptide
LGLPYGWEQAKDNDGNTYYIDHLNRTTTYTDPRKTR

SEQ ID NO: 908 - protein, 36 aa, Artificial Sequence
  Description of Artificial Sequence:  Synthetic Peptide
NDLPYGWEKAIDQKGQPYYINHLNKTTTYEEPIRHH

SEQ ID NO: 909 - protein, 36 aa, Artificial Sequence
  Description of Artificial Sequence:  Synthetic Peptide
QVPPYGWEMTANRDGRDYFINHMTQAIPFDDPRLES

SEQ ID NO: 910 - protein, 36 aa, Artificial Sequence
  Description of Artificial Sequence:  Synthetic Peptide
QVPPYGWEMMTNRDGRDYFINHMTQAIPFDDPRFDS

SEQ ID NO: 911 - protein, 36 aa, Artificial Sequence
  Description of Artificial Sequence:  Synthetic Peptide
KKLPPSWEEHFTNDGRRYFIDTATQTTTWKDPRFTY

SEQ ID NO: 912 - protein, 36 aa, Artificial Sequence
  Description of Artificial Sequence:  Synthetic Peptide
DCLPYGWEEAYTADGIKYFINHVTQTTSWIHPVMSV

SEQ ID NO: 913 - protein, 36 aa, Artificial Sequence
  Description of Artificial Sequence:  Synthetic Peptide
TDLPTGWEEAYTFEGARYYINHNERKVTCKHPVTGQ

SEQ ID NO: 914 - protein, 36 aa, Artificial Sequence; identical to SEQ ID NO: 152
  Description of Artificial Sequence:  Synthetic Peptide

SEQ ID NO: 915 - protein, 36 aa, Artificial Sequence
  Description of Artificial Sequence:  Synthetic Peptide
LDLPGRWTYGVDRGGRIFFINDEEKSTSWLHPGTGS

SEQ ID NO: 916 - protein, 36 aa, Artificial Sequence; identical to SEQ ID NO: 124
  Description of Artificial Sequence:  Synthetic Peptide

SEQ ID NO: 917 - protein, 36 aa, Artificial Sequence
  Description of Artificial Sequence:  Synthetic Peptide
VPLPAGWEMAKTSSGQRYFLNHNDQTTTWQDPRKAM

SEQ ID NO: 918 - protein, 36 aa, Artificial Sequence
  Description of Artificial Sequence:  Synthetic Peptide
VPLPPGWEMAKTPSGQRYFLNHIDQTTTWQDPRKAM

SEQ ID NO: 919 - protein, 36 aa, Artificial Sequence
  Description of Artificial Sequence:  Synthetic Peptide
VPLPAGWEMAKTSSGQRYFKNHIDQTTTWQDPRKAM

SEQ ID NO: 920 - protein, 35 aa, Artificial Sequence
  Description of Artificial Sequence:  Synthetic Peptide
  MOD_RES (14)..(35): x = any natural occuring amino acid
VPLPAGWEMAKTSXGQRYFLNHIDQTTTWQDPRKX

SEQ ID NO: 921 - protein, 36 aa, Artificial Sequence
  Description of Artificial Sequence:  Synthetic Peptide
LPLPPGWEMTFTATGQRYFLNHIEKITTWQDPRKAM

SEQ ID NO: 922 - protein, 36 aa, Artificial Sequence
  Description of Artificial Sequence:  Synthetic Peptide
LPLPPGWEMTFTATGQRYFLNHIEKITTWQDPRKVM

SEQ ID NO: 923 - protein, 36 aa, Artificial Sequence
  Description of Artificial Sequence:  Synthetic Peptide
GALPPGWEQAKTNDGQIYYLNHTTKSTQWEDPRIQY

SEQ ID NO: 924 - protein, 36 aa, Artificial Sequence
  Description of Artificial Sequence:  Synthetic Peptide
PELPEGYEQRTTVQGQVYFLHTQTGVSTWHDPRIPR

SEQ ID NO: 925 - protein, 36 aa, Artificial Sequence
  Description of Artificial Sequence:  Synthetic Peptide
PELPEGYEQRTTVQGQVYFLHTQTGVSTWHDPRIPS

SEQ ID NO: 926 - protein, 36 aa, Artificial Sequence
  Description of Artificial Sequence:  Synthetic Peptide
PDLPEGYEQRTTVQGQVYFLHTQTGVSTWHDPRIPR

SEQ ID NO: 927 - protein, 36 aa, Artificial Sequence
  Description of Artificial Sequence:  Synthetic Peptide
QDLPEGYEQRTTVQGQVYFLHTQTGVSTWHDPRIPR

SEQ ID NO: 928 - protein, 36 aa, Artificial Sequence
  Description of Artificial Sequence:  Synthetic Peptide
PDLPEGYEQRTTQQGQVYFLHTQTGVSTWHDPRVPR

SEQ ID NO: 929 - protein, 36 aa, Artificial Sequence
  Description of Artificial Sequence:  Synthetic Peptide
VDLPHGYEIRTTQQGQVYFYHIPTKQSTWHDPRIPR

SEQ ID NO: 930 - protein, 36 aa, Artificial Sequence; identical to SEQ ID NO: 149
  Description of Artificial Sequence:  Synthetic Peptide

SEQ ID NO: 931 - protein, 36 aa, Artificial Sequence
  Description of Artificial Sequence:  Synthetic Peptide
EVLPEGWVQVTHNSGMPLFLHRKTRVCCASRPYFLG

SEQ ID NO: 932 - protein, 36 aa, Artificial Sequence
  Description of Artificial Sequence:  Synthetic Peptide
EVLPEGWVQATHMSGMPLYLHKASRVCTASRPYFLG

SEQ ID NO: 933 - protein, 36 aa, Artificial Sequence; identical to SEQ ID NO: 125
  Description of Artificial Sequence:  Synthetic Peptide

SEQ ID NO: 934 - protein, 35 aa, Artificial Sequence
  Description of Artificial Sequence:  Synthetic Peptide
HPLPDGWTVITHFSGMPVYYHRFTRVVTHSRPYQV

SEQ ID NO: 935 - protein, 35 aa, Artificial Sequence
  Description of Artificial Sequence:  Synthetic Peptide
NPLPEGWTVISHQSGMPVYYHKFTRVVTHSKPYLV

SEQ ID NO: 936 - protein, 36 aa, Artificial Sequence
  Description of Artificial Sequence:  Synthetic Peptide
APLPGEWKPCQDITGDIYYFNFANGQSMWDHPCDEH

SEQ ID NO: 937 - protein, 36 aa, Artificial Sequence
  Description of Artificial Sequence:  Synthetic Peptide
APLPKGWKPCQNITGDLYYFNFDTGQSIWDHPCDEH

SEQ ID NO: 938 - protein, 37 aa, Artificial Sequence
  Description of Artificial Sequence:  Synthetic Peptide
AALPTDWKICYSEEKNGHYYHNTRTKESQWDHPLDAI

SEQ ID NO: 939 - protein, 36 aa, Artificial Sequence
  Description of Artificial Sequence:  Synthetic Peptide
APLPEHWKACRSEKGELYYFNFKTGESIWDHPLDEH

SEQ ID NO: 940 - protein, 36 aa, Artificial Sequence
  Description of Artificial Sequence:  Synthetic Peptide
APLPENWKACRSEKGDLYYFNFKTGESNWDHPLDKQ

SEQ ID NO: 941 - protein, 36 aa, Artificial Sequence
  Description of Artificial Sequence:  Synthetic Peptide
APLPPDWRVASTADGDIYYYHKDKREPTWDHPMDEF

SEQ ID NO: 942 - protein, 35 aa, Artificial Sequence
  Description of Artificial Sequence:  Synthetic Peptide
NHLLPGWHVAYDEVGDPYYYHDDGRSQWDAPLNTT

SEQ ID NO: 943 - protein, 35 aa, Artificial Sequence
  Description of Artificial Sequence:  Synthetic Peptide
NDLPPGWHVANDEDGDPYYYHDDGRNQWVRPGAGN

SEQ ID NO: 944 - protein, 35 aa, Artificial Sequence
  Description of Artificial Sequence:  Synthetic Peptide
DLPPGWEKHQDPQGYSYYWHVDSGTIQRQPPPPVR

SEQ ID NO: 945 - protein, 35 aa, Artificial Sequence
  Description of Artificial Sequence:  Synthetic Peptide
DLPPGWEKHEDPQGYSYYWHVDSGTIQRQPPPPVN

SEQ ID NO: 946 - protein, 35 aa, Artificial Sequence
  Description of Artificial Sequence:  Synthetic Peptide
TGLPPGWRKIRDAAGTYYWHVPSGSTQWQRPTWEL

SEQ ID NO: 947 - protein, 35 aa, Artificial Sequence
  Description of Artificial Sequence:  Synthetic Peptide
AGLPPGWRKIHDAAGTYYWHVPSGSTQWQRPTWEL

SEQ ID NO: 948 - protein, 35 aa, Artificial Sequence
  Description of Artificial Sequence:  Synthetic Peptide
PDLPPGWKRVNDIAGTYYWHIPTGTTQWERPVSIP

SEQ ID NO: 949 - protein, 35 aa, Artificial Sequence
  Description of Artificial Sequence:  Synthetic Peptide
PDLPPGWKRVSDIAGTYYWHIPTGTTQWERPVSIP

SEQ ID NO: 950 - protein, 35 aa, Artificial Sequence
  Description of Artificial Sequence:  Synthetic Peptide
SDLPAGWMRVQDTSGTYYWHIPTGTTQWEPPGRAS

SEQ ID NO: 951 - protein, 39 aa, Artificial Sequence
  Description of Artificial Sequence:  Synthetic Peptide
SSSNNNSPWKQYYSKEEGRPYYHNEITGETQWQKPRKIE

SEQ ID NO: 952 - protein, 37 aa, Artificial Sequence
  Description of Artificial Sequence:  Synthetic Peptide
YPRQVGVWKEYYSGEGRPYYYNEQTNTTQWEMPKEFE

SEQ ID NO: 953 - protein, 38 aa, Artificial Sequence
  Description of Artificial Sequence:  Synthetic Peptide
AAVPEASLWVEGKSDEGHTYYWNVKTNESVWKPPKEGY

SEQ ID NO: 954 - protein, 38 aa, Artificial Sequence
  Description of Artificial Sequence:  Synthetic Peptide
AQVGNGSMWVEAETDEGFPYYWNVKTGESIWETPKEGF

SEQ ID NO: 955 - protein, 38 aa, Artificial Sequence
  Description of Artificial Sequence:  Synthetic Peptide
TTPIPGTPWCVVWTGDERVFFYNPTTRLSMWDRPDDLI

SEQ ID NO: 956 - protein, 38 aa, Artificial Sequence
  Description of Artificial Sequence:  Synthetic Peptide
TTPIPGTPWCIVWTGDERVFFYNPTTRLSMWDRPEDLI

SEQ ID NO: 957 - protein, 38 aa, Artificial Sequence
  Description of Artificial Sequence:  Synthetic Peptide
TTPIPGTPWCVVWTGDERVFFYNPTTRLSMWERPEDLL

SEQ ID NO: 958 - protein, 38 aa, Artificial Sequence
  Description of Artificial Sequence:  Synthetic Peptide
STPIAGTPWCVVWTGDSRVFFYNPSTRTSVWDRPEDLL

SEQ ID NO: 959 - protein, 38 aa, Artificial Sequence
  Description of Artificial Sequence:  Synthetic Peptide
STPISGTPWCVVWTGDGRVFFYNPSTRTSVWERPEELK

SEQ ID NO: 960 - protein, 38 aa, Artificial Sequence
  Description of Artificial Sequence:  Synthetic Peptide
STPVSGTPWCVVWTGDKKVFFYNPSTKTSVWERPPDTY

SEQ ID NO: 961 - protein, 38 aa, Artificial Sequence
  Description of Artificial Sequence:  Synthetic Peptide
STPVSGTPWCVVWTGDDKVFFYNPSTKCSVWERPPDTY

SEQ ID NO: 962 - protein, 38 aa, Artificial Sequence
  Description of Artificial Sequence:  Synthetic Peptide
STPVPGSPWCVVWTGDDRVFFFNPTMQLSVWEKPVDLQ

SEQ ID NO: 963 - protein, 38 aa, Artificial Sequence
  Description of Artificial Sequence:  Synthetic Peptide
STQVPGSPWCVVWTGDDRVFFFNPTMHLSVWEKPMDLK

SEQ ID NO: 964 - protein, 38 aa, Artificial Sequence
  Description of Artificial Sequence:  Synthetic Peptide
SSPSVESDWSVHTNEKGTPYYHNRVTKQTSWIKPDVLK

SEQ ID NO: 965 - protein, 38 aa, Artificial Sequence
  Description of Artificial Sequence:  Synthetic Peptide
TASPAESEWSEHPHTDGRSYYYNKITKQSSWVKPDALK

SEQ ID NO: 966 - protein, 59 aa, Artificial Sequence
  Description of Artificial Sequence:  Synthetic Peptide
LTPQSASDWQEHTSADGRKCLFHGFGSMNSLYLIYTYLSRYYYNKRTKQSNWEKPLELM

SEQ ID NO: 967 - protein, 38 aa, Artificial Sequence
  Description of Artificial Sequence:  Synthetic Peptide
LTPQSASDWQEHTSADGRKYYYNKRTKQSNWEKPLELM

SEQ ID NO: 968 - protein, 38 aa, Artificial Sequence
  Description of Artificial Sequence:  Synthetic Peptide
SSETSSSDWQEHTSADGKKYYYNKKTRQSSWEKPAELM

SEQ ID NO: 969 - protein, 38 aa, Artificial Sequence
  Description of Artificial Sequence:  Synthetic Peptide
PSQKALTDWVEHTSADGRKYFFNKRTKKSTWEKPVELM

SEQ ID NO: 970 - protein, 38 aa, Artificial Sequence
  Description of Artificial Sequence:  Synthetic Peptide
VTTAIVNEWSEHKTPEGRTYYYNSITKQSLWEKPDEMK

SEQ ID NO: 971 - protein, 38 aa, Artificial Sequence
  Description of Artificial Sequence:  Synthetic Peptide
GVMATSTEWTEHKAPDGRPYYYNQNTKQSSWEKPEALM

SEQ ID NO: 972 - protein, 38 aa, Artificial Sequence
  Description of Artificial Sequence:  Synthetic Peptide
GTGPPRALWSEHVAPDGRIYYYNADDKQSVWEKPSVLK

SEQ ID NO: 973 - protein, 38 aa, Artificial Sequence
  Description of Artificial Sequence:  Synthetic Peptide
AASGAKSMWTEHKSPDGRTYYYNTETKQSTWEKPDDLK

SEQ ID NO: 974 - protein, 38 aa, Artificial Sequence
  Description of Artificial Sequence:  Synthetic Peptide
EHSKQKSTWTEHKSPDGRTYYYNTETKQSTWEKPDDLK

SEQ ID NO: 975 - protein, 38 aa, Artificial Sequence
  Description of Artificial Sequence:  Synthetic Peptide
EQPKKKSVWTEHKSLDGKIYYYNTETKQSTWEKPDELK

SEQ ID NO: 976 - protein, 38 aa, Artificial Sequence
  Description of Artificial Sequence:  Synthetic Peptide
GCSLLKSMWTEHKSPDGRTYYYNTETKQSTWEKPDDLK

SEQ ID NO: 977 - protein, 38 aa, Artificial Sequence
  Description of Artificial Sequence:  Synthetic Peptide
PSKTVASDWHEVKTEDSRVYYYNSVTRKSVWEKPEELM

SEQ ID NO: 978 - protein, 38 aa, Artificial Sequence
  Description of Artificial Sequence:  Synthetic Peptide
EKKLSKLAWKEYATADGKKYWYNVNTRESVWDIPDEYK

SEQ ID NO: 979 - protein, 38 aa, Artificial Sequence
  Description of Artificial Sequence:  Synthetic Peptide
ERADASTEWKEFTTQEGRKYYYNKVTKQSKWTIPDELK

SEQ ID NO: 980 - protein, 38 aa, Artificial Sequence
  Description of Artificial Sequence:  Synthetic Peptide
ERADASTVWKEFTTPEGKKYYYNKVTKESKWTIPEDLK

SEQ ID NO: 981 - protein, 38 aa, Artificial Sequence
  Description of Artificial Sequence:  Synthetic Peptide
ERADARTDWKEHSSPDGRKYYYNKITKQSTWTMPEEMK

SEQ ID NO: 982 - protein, 38 aa, Artificial Sequence
  Description of Artificial Sequence:  Synthetic Peptide
EQMLSKCPWKEYKSDTGKPYYYNSQTKESRWTKPKELE

SEQ ID NO: 983 - protein, 38 aa, Artificial Sequence
  Description of Artificial Sequence:  Synthetic Peptide
EQLLSKCPWKEYKSDSGKPYYYNSQTKESRWAKPKELE

SEQ ID NO: 984 - protein, 38 aa, Artificial Sequence
  Description of Artificial Sequence:  Synthetic Peptide
ELLLSQCPWKEYKSDTGKPYYYNNQSKESRWTRPKDLD

SEQ ID NO: 985 - protein, 38 aa, Artificial Sequence
  Description of Artificial Sequence:  Synthetic Peptide
ELLLSQCPWKEYKSDTGKPYYYNNQSQESRWTRPKDLD

SEQ ID NO: 986 - protein, 38 aa, Artificial Sequence
  Description of Artificial Sequence:  Synthetic Peptide
EKQLSQCPWKEYRSDSGKLYYHNTATKESQWVAPPEYL

SEQ ID NO: 987 - protein, 38 aa, Artificial Sequence
  Description of Artificial Sequence:  Synthetic Peptide
ELLHNQCPWKEYRSDTGKVYYHNVATKETCWEPPPEYV

SEQ ID NO: 988 - protein, 37 aa, Artificial Sequence
  Description of Artificial Sequence:  Synthetic Peptide
AKQAQQSVWKEFEADGKPYYYNTITKKTQWVKPEGEI

SEQ ID NO: 989 - protein, 38 aa, Artificial Sequence
  Description of Artificial Sequence:  Synthetic Peptide
ELLLRENGWKAAKTADGKVYYYNPTTRETSWTIPAFEK

SEQ ID NO: 990 - protein, 38 aa, Artificial Sequence
  Description of Artificial Sequence:  Synthetic Peptide
ERALANQPWKEYTAEGGRKYWYNTETKQSSWEMPDVYK

SEQ ID NO: 991 - protein, 36 aa, Artificial Sequence
  Description of Artificial Sequence:  Synthetic Peptide
ILPGTDWALVSTNDGKKYYYNNKTKVSSWQIPAEVK

SEQ ID NO: 992 - protein, 36 aa, Artificial Sequence
  Description of Artificial Sequence:  Synthetic Peptide
SLPGTDWALVSTNDGKKYYYNNKTKVSSWQIPAEVK

SEQ ID NO: 993 - protein, 36 aa, Artificial Sequence; identical to SEQ ID NO: 158
  Description of Artificial Sequence:  Synthetic Peptide

SEQ ID NO: 994 - protein, 36 aa, Artificial Sequence; identical to SEQ ID NO: 141
  Description of Artificial Sequence:  Synthetic Peptide

SEQ ID NO: 995 - protein, 36 aa, Artificial Sequence
  Description of Artificial Sequence:  Synthetic Peptide
IQDSDSWSAHKTEAGVVYYYNALTGESTYQKPPGYK

SEQ ID NO: 996 - protein, 36 aa, Artificial Sequence
  Description of Artificial Sequence:  Synthetic Peptide
EASKGGWVEGVTADGHCYYYDLITGASQWEKPEGFQ

SEQ ID NO: 997 - protein, 36 aa, Artificial Sequence
  Description of Artificial Sequence:  Synthetic Peptide
EASKGGWVEGVTADGHCYYYDLITGASQWEKPKGFQ

SEQ ID NO: 998 - protein, 36 aa, Artificial Sequence
  Description of Artificial Sequence:  Synthetic Peptide
EASKGRWVEGVTADGHCYYYDLVTGASQWEKPEGFQ

SEQ ID NO: 999 - protein, 36 aa, Artificial Sequence
  Description of Artificial Sequence:  Synthetic Peptide
DPSKGRWVEGITSEGYHYYYDLISGASQWEKPEGFQ

SEQ ID NO: 1000 - protein, 36 aa, Artificial Sequence
  Description of Artificial Sequence:  Synthetic Peptide
TAAKAVWVEGLSEDGYTYYYNTETGESKWEKPEDFI

SEQ ID NO: 1001 - protein, 36 aa, Artificial Sequence; identical to SEQ ID NO: 1000
  Description of Artificial Sequence:  Synthetic Peptide

SEQ ID NO: 1002 - protein, 36 aa, Artificial Sequence
  Description of Artificial Sequence:  Synthetic Peptide
TAAKAIWVEGLSEDGYTYYYNTETGESKWEKPDDFI

SEQ ID NO: 1003 - protein, 36 aa, Artificial Sequence
  Description of Artificial Sequence:  Synthetic Peptide
TAVKTVWVEGLSEDGFTYYYNTETGESRWEKPDDFI

SEQ ID NO: 1004 - protein, 36 aa, Artificial Sequence
  Description of Artificial Sequence:  Synthetic Peptide
AKTKYVWAIAKSEAGETYYYNKITKETQWTAPTPVQ

SEQ ID NO: 1005 - protein, 36 aa, Artificial Sequence
  Description of Artificial Sequence:  Synthetic Peptide
QNMKYVWATAKDPDGQTYYYNKVTKETQWHLPTAEQ

SEQ ID NO: 1006 - protein, 32 aa, Artificial Sequence
  Description of Artificial Sequence:  Synthetic Peptide
MVWKRAKSEDGKAYYYNTETNETTWDKPDAVE

SEQ ID NO: 1007 - protein, 36 aa, Artificial Sequence
  Description of Artificial Sequence:  Synthetic Peptide
SINKNIWQKHVTSDGHPYYYNSITGHSQWEKPKEIT

SEQ ID NO: 1008 - protein, 36 aa, Artificial Sequence
  Description of Artificial Sequence:  Synthetic Peptide
GGNKNVWQKHVTTDGHPYYYNSVTGHSQWEKPKEMS

SEQ ID NO: 1009 - protein, 37 aa, Artificial Sequence
  Description of Artificial Sequence:  Synthetic Peptide
PFEPADDWSEHISSSGKKYYYNCRTEVSQWEKPKEWL

SEQ ID NO: 1010 - protein, 37 aa, Artificial Sequence
  Description of Artificial Sequence:  Synthetic Peptide
PFEPADDWSEHINSSGKKFYYNCRTEVSQWEKPKKWL

SEQ ID NO: 1011 - protein, 37 aa, Artificial Sequence
  Description of Artificial Sequence:  Synthetic Peptide
PYDSADDWSEHISSSGKKYYYNCRTEVSQWEKPKEWL

SEQ ID NO: 1012 - protein, 37 aa, Artificial Sequence
  Description of Artificial Sequence:  Synthetic Peptide
VRERGDDWSEHISSSGKNYYYSCCTEVSQWEKPKEWL

SEQ ID NO: 1013 - protein, 37 aa, Artificial Sequence
  Description of Artificial Sequence:  Synthetic Peptide
RTARYGDWSEHVSSSGKMYYYNCKTEISQWEKPKEWV

SEQ ID NO: 1014 - protein, 37 aa, Artificial Sequence
  Description of Artificial Sequence:  Synthetic Peptide
VPRTFAGWTEQMSSSGKMYYYNKKTEISQWDKPAEWP

SEQ ID NO: 1015 - protein, 37 aa, Artificial Sequence
  Description of Artificial Sequence:  Synthetic Peptide
RVNRVGDWSEHVSSSGKKYYYNCKTEVSQWEKPREWI

SEQ ID NO: 1016 - protein, 37 aa, Artificial Sequence
  Description of Artificial Sequence:  Synthetic Peptide
VGSVKCTWTEHTSPDGFKYYYNGLTGESKWEKPEEMI

SEQ ID NO: 1017 - protein, 37 aa, Artificial Sequence
  Description of Artificial Sequence:  Synthetic Peptide
VVSRKCNWTEHTSPDGFKYYYNGQTGESKWEKPEEMV

SEQ ID NO: 1018 - protein, 37 aa, Artificial Sequence
  Description of Artificial Sequence:  Synthetic Peptide
AVSLTCNLTEHTSPEGFKYYYNSITRESKWEKPEEYV

SEQ ID NO: 1019 - protein, 37 aa, Artificial Sequence
  Description of Artificial Sequence:  Synthetic Peptide
AVSLTCNWTEHTSPEGFKYYYNSTTRESKWEKPEEYV

SEQ ID NO: 1020 - protein, 37 aa, Artificial Sequence
  Description of Artificial Sequence:  Synthetic Peptide
AVSLTCNWTEHTSPEGFKYYYNSITRESKWEKPEEYV

SEQ ID NO: 1021 - protein, 37 aa, Artificial Sequence
  Description of Artificial Sequence:  Synthetic Peptide
AVSLTCNWTEHTSPEGFKYYYNSITRESKWEKPEEYI

SEQ ID NO: 1022 - protein, 37 aa, Artificial Sequence
  Description of Artificial Sequence:  Synthetic Peptide
AVSLTCNWTEHTSPEGFKYYYNSITRESKWEKLEEYI

SEQ ID NO: 1023 - protein, 37 aa, Artificial Sequence
  Description of Artificial Sequence:  Synthetic Peptide
AVSLTCNWTEHTSPEGFKYYYNSITRESKREKPEEYI

SEQ ID NO: 1024 - protein, 37 aa, Artificial Sequence
  Description of Artificial Sequence:  Synthetic Peptide
AVSLICNWTEHTSPEGFKYYYNSITRESKWEKPEEYI

SEQ ID NO: 1025 - protein, 37 aa, Artificial Sequence
  Description of Artificial Sequence:  Synthetic Peptide
AVSLTCNWTEHTSPEGFKHYYNSITRESKWEKPEEYI

SEQ ID NO: 1026 - protein, 37 aa, Artificial Sequence
  Description of Artificial Sequence:  Synthetic Peptide
AVSSTCNWTEHTSPEGFKYYYNSITRESKWEKPEEYI

SEQ ID NO: 1027 - protein, 37 aa, Artificial Sequence
  Description of Artificial Sequence:  Synthetic Peptide
AVSLTCNWTEHTSPEGFKYYYNSITRESKWVKPEEYI

SEQ ID NO: 1028 - protein, 37 aa, Artificial Sequence
  Description of Artificial Sequence:  Synthetic Peptide
AVSLTCNWTKHTSPEGFKYYYNSITRESKWEKPEEYI

SEQ ID NO: 1029 - protein, 37 aa, Artificial Sequence
  Description of Artificial Sequence:  Synthetic Peptide
AVSLTCNWTEHTPPEGFKYYYNSITRESKWEKPEEYI

SEQ ID NO: 1030 - protein, 37 aa, Artificial Sequence
  Description of Artificial Sequence:  Synthetic Peptide
AVSLACNWTEHTSPEGFKYYYNSITRESKWEKPEEYI

SEQ ID NO: 1031 - protein, 37 aa, Artificial Sequence
  Description of Artificial Sequence:  Synthetic Peptide
AVSLTCNWTEHTSPGGFKYYYNSITRESKWEKPEEYI

SEQ ID NO: 1032 - protein, 37 aa, Artificial Sequence
  Description of Artificial Sequence:  Synthetic Peptide
AVSLTCNWAEHTSPEGFKYYYNSITRESKWEKPEEYI

SEQ ID NO: 1033 - protein, 37 aa, Artificial Sequence
  Description of Artificial Sequence:  Synthetic Peptide
AVSLTCDWTEHTSPEGFKYYYNSITRESKWEKPEEYI

SEQ ID NO: 1034 - protein, 37 aa, Artificial Sequence
  Description of Artificial Sequence:  Synthetic Peptide
AVSLTCSWTEHTSPEGFKYYYNSITRKSKWEKPEEYI

SEQ ID NO: 1035 - protein, 37 aa, Artificial Sequence
  Description of Artificial Sequence:  Synthetic Peptide
AVSLTCNWTEHTSPEGFKYYYNSMTRESKWEKPEEYI

SEQ ID NO: 1036 - protein, 37 aa, Artificial Sequence
  Description of Artificial Sequence:  Synthetic Peptide
AVSLTCNWTEHTSPEGFKYYYNSITRESKREKPEECI

SEQ ID NO: 1037 - protein, 37 aa, Artificial Sequence
  Description of Artificial Sequence:  Synthetic Peptide
AVSLTCNWTEHTSPEGFKYYYNSITRESEWEKPEEYI

SEQ ID NO: 1038 - protein, 37 aa, Artificial Sequence
  Description of Artificial Sequence:  Synthetic Peptide
AVPLTCNWTEHTSPEGFKYYYNSITRESKWDKPEEYV

SEQ ID NO: 1039 - protein, 37 aa, Artificial Sequence
  Description of Artificial Sequence:  Synthetic Peptide
TVSSECDWSEHTCPNGNKYYFHCITCESTWEKPDEYS

SEQ ID NO: 1040 - protein, 37 aa, Artificial Sequence
  Description of Artificial Sequence:  Synthetic Peptide
IVARATVWSEHTAPDGRMFYYNASKGESVWEKPQALR

SEQ ID NO: 1041 - protein, 37 aa, Artificial Sequence
  Description of Artificial Sequence:  Synthetic Peptide
VIARAAEWSEHRAPDGRPYYFHAGRGESVWEKPQALR

SEQ ID NO: 1042 - protein, 39 aa, Artificial Sequence
  Description of Artificial Sequence:  Synthetic Peptide
QIPQNPDDAWNEFNAPDGRKYYFNSITQENTWEKPKALI

SEQ ID NO: 1043 - protein, 39 aa, Artificial Sequence
  Description of Artificial Sequence:  Synthetic Peptide
GHPQNPDEAWSEFSAPDGRKYYYNSITQENTWEKPKALL

SEQ ID NO: 1044 - protein, 39 aa, Artificial Sequence
  Description of Artificial Sequence:  Synthetic Peptide
PTLPPNEEIWVENKTPDGKVYYYNARTRESAWSKPDGVK

SEQ ID NO: 1045 - protein, 39 aa, Artificial Sequence
  Description of Artificial Sequence:  Synthetic Peptide
PALPPTEEIWVENKTPDGKVYYYNARTRESAWTKPDGVK

SEQ ID NO: 1046 - protein, 39 aa, Artificial Sequence
  Description of Artificial Sequence:  Synthetic Peptide
TPLVSTEEIWVENKSPEGKVYYYNARTRESSWTKPEGVK

SEQ ID NO: 1047 - protein, 36 aa, Artificial Sequence
  Description of Artificial Sequence:  Synthetic Peptide
ATILSEWSEYKTADGKTYYYNNRTLESTWDKPQELK

SEQ ID NO: 1048 - protein, 36 aa, Artificial Sequence
  Description of Artificial Sequence:  Synthetic Peptide
ATAVSEWTEYKTADGKTYYYNNRTLESTWEKPQELK

SEQ ID NO: 1049 - protein, 36 aa, Artificial Sequence
  Description of Artificial Sequence:  Synthetic Peptide
ALGTSDWAEFKTPEGKSYYYNKHTQETTWDKPEELR

SEQ ID NO: 1050 - protein, 32 aa, Artificial Sequence
  Description of Artificial Sequence:  Synthetic Peptide
DLWVETKTADGKSYYYHAISRETTWTRPEGPN

SEQ ID NO: 1051 - protein, 37 aa, Artificial Sequence
  Description of Artificial Sequence:  Synthetic Peptide
VTGPPEIWVETKAEDGRSYYYHAVTRETTWSRPDGPA

SEQ ID NO: 1052 - protein, 37 aa, Artificial Sequence
  Description of Artificial Sequence:  Synthetic Peptide
CEEGQELWVETETAEGKKYFYHPVNRNTIWERPQNSK

SEQ ID NO: 1053 - protein, 38 aa, Artificial Sequence
  Description of Artificial Sequence:  Synthetic Peptide
PAIQINGEWETHKDSSGRCYYYNRGTQERTWKPPRWTR

SEQ ID NO: 1054 - protein, 38 aa, Artificial Sequence
  Description of Artificial Sequence:  Synthetic Peptide
PAIQVNGEWETHKDSSGRCYYYNRTTQERTWKPPRWAR

SEQ ID NO: 1055 - protein, 38 aa, Artificial Sequence
  Description of Artificial Sequence:  Synthetic Peptide
PPVQITGEWETHKDNSGRYYYFNKTTQERTWKPPRGTK

SEQ ID NO: 1056 - protein, 38 aa, Artificial Sequence
  Description of Artificial Sequence:  Synthetic Peptide
SPLHVLGDWETHKDTSGRNFYFNRTTQERTWKPPRSRD

SEQ ID NO: 1057 - protein, 39 aa, Artificial Sequence
  Description of Artificial Sequence:  Synthetic Peptide
PLLQRLDAWEQHLDPNSGRCFYINSLTGCKSWKPPRRSR

SEQ ID NO: 1058 - protein, 37 aa, Artificial Sequence
  Description of Artificial Sequence:  Synthetic Peptide
VKLPDGWESRIDPVSGKVFYLNHNNKTTSWISPLEHA

SEQ ID NO: 1059 - protein, 36 aa, Artificial Sequence
  Description of Artificial Sequence:  Synthetic Peptide
SGGSSPWQALQDDQGRTYYYNSTTGVSQWERPADMP

SEQ ID NO: 1060 - protein, 36 aa, Artificial Sequence
  Description of Artificial Sequence:  Synthetic Peptide
IVLPPNWKTARDPEGKIYYYHVITRQTQWDPPTWES

SEQ ID NO: 1061 - protein, 36 aa, Artificial Sequence
  Description of Artificial Sequence:  Synthetic Peptide
MKLPPYWRFAIDERGRLYYYHVKERIPQWEPPRKPG

SEQ ID NO: 1062 - protein, 35 aa, Artificial Sequence
  Description of Artificial Sequence:  Synthetic Peptide
QPLPSGWECISMNNRTVFLNHSNKETSFFDPRIRR

SEQ ID NO: 1063 - protein, 35 aa, Artificial Sequence
  Description of Artificial Sequence:  Synthetic Peptide
ANLPSEWQAYWDESTKKVYYGNTSTSQTSWTRPTT

SEQ ID NO: 1064 - protein, 36 aa, Artificial Sequence
  Description of Artificial Sequence:  Synthetic Peptide
SGLPPGWDERRTPDGRTFYFNKRMGTSAWTKPANSL

SEQ ID NO: 1065 - protein, 37 aa, Artificial Sequence
  Description of Artificial Sequence:  Synthetic Peptide
PAYATPWRELVDEASGAPFFFNVETGDTTWELPAALA

SEQ ID NO: 1066 - protein, 37 aa, Artificial Sequence
  Description of Artificial Sequence:  Synthetic Peptide
YPLPKNWRKEYDVGCKAFYFYNKDTRIVSWLPPTHPD

SEQ ID NO: 1067 - protein, 36 aa, Artificial Sequence
  Description of Artificial Sequence:  Synthetic Peptide
RDLLNGWFEYETDVGRTFFYNKETGRSQWIPPRLIR

SEQ ID NO: 1068 - protein, 36 aa, Artificial Sequence; identical to SEQ ID NO: 122
  Description of Artificial Sequence:  Synthetic Peptide

SEQ ID NO: 1069 - protein, 37 aa, Artificial Sequence
  Description of Artificial Sequence:  Synthetic Peptide
TDVTSQWKMILHEESNQYYYWNTETGETSWELPTVLT

SEQ ID NO: 1070 - protein, 38 aa, Artificial Sequence
  Description of Artificial Sequence:  Synthetic Peptide
SQTPSESQWKTYVDAKKRKFYVNHVTKETRWTKPDILN

SEQ ID NO: 1071 - protein, 35 aa, Artificial Sequence
  Description of Artificial Sequence:  Synthetic peptide
PLPPGWEIKIDPQTGWPFFVDHNSRTTTWNDPRVP

SEQ ID NO: 1072 - protein, 35 aa, Artificial Sequence
  Description of Artificial Sequence:  Synthetic peptide
GLPKPWIVKISRSRNRPYFFNTETHESLWEPPAAT

SEQ ID NO: 1073 - protein, 41 aa, Artificial Sequence
  Description of Artificial Sequence:  Synthetic peptide
PLPNLGQSVKPPWERATTAANVPYYIDHERQTTHWDHPEMI

SEQ ID NO: 1074 - protein, 34 aa, Artificial Sequence
  Description of Artificial Sequence:  Synthetic peptide
PLPSGWECITMNNRTVFLNHANKETSFYDPRIRR

SEQ ID NO: 1075 - protein, 34 aa, Artificial Sequence
  Description of Artificial Sequence:  Synthetic peptide
PLPEGWEMRFTVDGIPYFVDHNRRATTYIDPRTG

SEQ ID NO: 1076 - protein, 34 aa, Artificial Sequence
  Description of Artificial Sequence:  Synthetic peptide
PLPEGWEMRFTVDGIPYFVDHNRRTTTYIDPRTG

SEQ ID NO: 1077 - protein, 34 aa, Artificial Sequence
  Description of Artificial Sequence:  Synthetic peptide
PMPQGWEMCYDSDGVRYFKDHNSKTTTWDDPRLK

SEQ ID NO: 1078 - protein, 34 aa, Artificial Sequence
  Description of Artificial Sequence:  Synthetic peptide
GLPPGWEEKQDERGRSYYVDHNSRTTTWTKPTVQ

SEQ ID NO: 1079 - protein, 34 aa, Artificial Sequence
  Description of Artificial Sequence:  Synthetic peptide
ALPAGWEQRELPNGRVYYVDHNTKTTTWERPLPP

SEQ ID NO: 1080 - protein, 34 aa, Artificial Sequence
  Description of Artificial Sequence:  Synthetic peptide
ELPYGWEKIDDPIYGTYYVDHINRRTQFENPVLE

SEQ ID NO: 1081 - protein, 34 aa, Artificial Sequence
  Description of Artificial Sequence:  Synthetic peptide
ELPAGWEKIEDPVYGIYYVDHINRKTQYENPVLE

SEQ ID NO: 1082 - protein, 34 aa, Artificial Sequence
  Description of Artificial Sequence:  Synthetic peptide
ELPAGWEKIEDPVYGVYYVDHINRKTQYENPVLE

SEQ ID NO: 1083 - protein, 35 aa, Artificial Sequence
  Description of Artificial Sequence:  Synthetic peptide
KLPPGWEKRMSRPSGRGYYFNHITNPSQWERPSGN

SEQ ID NO: 1084 - protein, 34 aa, Artificial Sequence
  Description of Artificial Sequence:  Synthetic peptide
SVQGPWERAISPNKVPYYINHQTQTTCWDHPKMT

SEQ ID NO: 1085 - protein, 34 aa, Artificial Sequence
  Description of Artificial Sequence:  Synthetic peptide
SVQVPWERAISPNKVPYYINHQAQTTCWDHPKMT

SEQ ID NO: 1086 - protein, 34 aa, Artificial Sequence
  Description of Artificial Sequence:  Synthetic peptide
SVQLPWQRSISHNKVPYYINHQTQTTCWDHPKMT

SEQ ID NO: 1087 - protein, 34 aa, Artificial Sequence
  Description of Artificial Sequence:  Synthetic peptide
SVQHPWERAVAANKVPYFINHGTETTHWDHPRMT

SEQ ID NO: 1088 - protein, 34 aa, Artificial Sequence
  Description of Artificial Sequence:  Synthetic peptide
PLPPGWEEKVDNLGRTYYVNHNNRTTQWHRPSLM

SEQ ID NO: 1089 - protein, 34 aa, Artificial Sequence
  Description of Artificial Sequence:  Synthetic peptide
FLPPGWEMRIAPNGRPFFIDHNTKTTTWEDPRLK

SEQ ID NO: 1090 - protein, 34 aa, Artificial Sequence
  Description of Artificial Sequence:  Synthetic peptide
PLPPGWEERIHLDGRTFYIDHNSKITQWEDPRLQ

SEQ ID NO: 1091 - protein, 34 aa, Artificial Sequence
  Description of Artificial Sequence:  Synthetic peptide
RLPPGWERRTDNLGRTYYVDHNTRSTTWIRPNLS

SEQ ID NO: 1092 - protein, 34 aa, Artificial Sequence
  Description of Artificial Sequence:  Synthetic peptide
ELPPGWEQRYTPEGRPYFVDHNTRTTTWVDPRRQ

SEQ ID NO: 1093 - protein, 34 aa, Artificial Sequence
  Description of Artificial Sequence:  Synthetic peptide
PLPPGWEERQDILGRTYYVNHESRRTQWKRPTPQ

SEQ ID NO: 1094 - protein, 34 aa, Artificial Sequence
  Description of Artificial Sequence:  Synthetic peptide
PLPPGWEERTHTDGRIFYINHNIKRTQWEDPRLE

SEQ ID NO: 1095 - protein, 34 aa, Artificial Sequence
  Description of Artificial Sequence:  Synthetic peptide
FLPKGWEVRHAPNGRPFFIDHNTKTTTWEDPRLK

SEQ ID NO: 1096 - protein, 34 aa, Artificial Sequence
  Description of Artificial Sequence:  Synthetic peptide
RLPPGWERRADSLGRTYYVDHNTRTTTWTRPASS

SEQ ID NO: 1097 - protein, 34 aa, Artificial Sequence
  Description of Artificial Sequence:  Synthetic peptide
PLPSGWEMRLTNSARVYFVDHNTKTTTWDDPRLP

SEQ ID NO: 1098 - protein, 34 aa, Artificial Sequence
  Description of Artificial Sequence:  Synthetic peptide
DLPFGWEMRYTDTGRPYFVDHNTRTTTWVDPRNP

SEQ ID NO: 1099 - protein, 34 aa, Artificial Sequence
  Description of Artificial Sequence:  Synthetic peptide
PLPPGWERRVDDRRRVYYVDHNTRTTTWQRPTME

SEQ ID NO: 1100 - protein, 34 aa, Artificial Sequence
  Description of Artificial Sequence:  Synthetic peptide
PLPPGWEKRVDSTDRVYFVNHNTKTTQWEDPRTQ

SEQ ID NO: 1101 - protein, 34 aa, Artificial Sequence
  Description of Artificial Sequence:  Synthetic peptide
PLPEGWEIRYTREGVRYFVDHNTRTTTFKDPRNG

SEQ ID NO: 1102 - protein, 34 aa, Artificial Sequence; identical to SEQ ID NO: 706
  Description of Artificial Sequence:  Synthetic peptide

SEQ ID NO: 1103 - protein, 33 aa, Artificial Sequence
  Description of Artificial Sequence:  Synthetic peptide
PLPPGWEKRQDNGRVYYVNHNTRTTQWEDPRTQ

SEQ ID NO: 1104 - protein, 34 aa, Artificial Sequence
  Description of Artificial Sequence:  Synthetic peptide
PLPPGWERRVDNMGRIYYVDHFTRTTTWQRPTLE

SEQ ID NO: 1105 - protein, 34 aa, Artificial Sequence
  Description of Artificial Sequence:  Synthetic peptide
PLPPGWEKRTDSNGRVYFVNHNTRITQWEDPRSQ

SEQ ID NO: 1106 - protein, 34 aa, Artificial Sequence
  Description of Artificial Sequence:  Synthetic peptide
PLPPGWEERQDVLGRTYYVNHESRTTQWKRPSPE

SEQ ID NO: 1107 - protein, 34 aa, Artificial Sequence
  Description of Artificial Sequence:  Synthetic peptide
PLPPGWEERTHTDGRVFFINHNIKKTQWEDPRMQ

SEQ ID NO: 1108 - protein, 34 aa, Artificial Sequence
  Description of Artificial Sequence:  Synthetic peptide
PLPPGWEERQDVLGRTYYVNHESRRTQWKRPSPD

SEQ ID NO: 1109 - protein, 34 aa, Artificial Sequence
  Description of Artificial Sequence:  Synthetic peptide
PLPPGWEERTHTDGRVFFINHNIKKTQWEDPRLQ

SEQ ID NO: 1110 - protein, 34 aa, Artificial Sequence
  Description of Artificial Sequence:  Synthetic peptide
PLPPGWEIRKDGRGRVYYVDHNTRKTTWQRPNSE

SEQ ID NO: 1111 - protein, 34 aa, Artificial Sequence
  Description of Artificial Sequence:  Synthetic peptide
PLPDGWEKKIQSDNRVYFVNHKNRTTQWEDPRTQ

SEQ ID NO: 1112 - protein, 34 aa, Artificial Sequence
  Description of Artificial Sequence:  Synthetic peptide
PLPAGWEIRLDQYGRRYYVDHNTRSTYWEKPTPL

SEQ ID NO: 1113 - protein, 34 aa, Artificial Sequence
  Description of Artificial Sequence:  Synthetic peptide
PLPPGWEIRYTAAGERFFVDHNTRRTTFEDPRPG

SEQ ID NO: 1114 - protein, 34 aa, Artificial Sequence
  Description of Artificial Sequence:  Synthetic peptide
PMPPGWEEKVDNLGRTYYVNHNNKSTQWQRPSLI

SEQ ID NO: 1115 - protein, 34 aa, Artificial Sequence
  Description of Artificial Sequence:  Synthetic peptide
PLPPGWEERIHMDGRTFYIDHNTKITQWEDPRLQ

SEQ ID NO: 1116 - protein, 34 aa, Artificial Sequence
  Description of Artificial Sequence:  Synthetic peptide
GLPSGWEERKDAKGRTYYVNHNNRTTTWTRPIVQ

SEQ ID NO: 1117 - protein, 34 aa, Artificial Sequence
  Description of Artificial Sequence:  Synthetic peptide
PLPPGWEVRSTVSGRIYFVDHNNRTTQFTDPRLH

SEQ ID NO: 1118 - protein, 34 aa, Artificial Sequence
  Description of Artificial Sequence:  Synthetic peptide
PLVPTLDRGALAAMREQLKGHETQTTCWDHPKMT

SEQ ID NO: 1119 - protein, 34 aa, Artificial Sequence
  Description of Artificial Sequence:  Synthetic peptide
PLPENWEMAYTENGEVYFIDHNTKTTSWLDPRCL

SEQ ID NO: 1120 - protein, 35 aa, Artificial Sequence
  Description of Artificial Sequence:  Synthetic peptide
SVTLPWQRAISKSNLLPYYIEQTSEKTQWEHPVWV

SEQ ID NO: 1121 - protein, 34 aa, Artificial Sequence
  Description of Artificial Sequence:  Synthetic peptide
ELPSGWEQRFTPEGRAYFVDHNTRTTTWVDPRRQ

SEQ ID NO: 1122 - protein, 34 aa, Artificial Sequence
  Description of Artificial Sequence:  Synthetic peptide
RLPPGWERRTDNFGRTYYVDHNTRTTTWKRPTLD

SEQ ID NO: 1123 - protein, 34 aa, Artificial Sequence
  Description of Artificial Sequence:  Synthetic peptide
PLPSGWEMRLTNTARVYFVDHNTKTTTWDDPRLP

SEQ ID NO: 1124 - protein, 35 aa, Artificial Sequence
  Description of Artificial Sequence:  Synthetic peptide
SKRPPRTACETLTTMREHLKGHETQTTCWDHPKMT

SEQ ID NO: 1125 - protein, 34 aa, Artificial Sequence
  Description of Artificial Sequence:  Synthetic peptide
PLPDNWEMAYTEKGEVYFIDHNTKTTSWLDPRLA

SEQ ID NO: 1126 - protein, 34 aa, Artificial Sequence
  Description of Artificial Sequence:  Synthetic peptide
ILPPGWQSYLSPQGRRYYVNTTTNETTWERPSSS

SEQ ID NO: 1127 - protein, 34 aa, Artificial Sequence
  Description of Artificial Sequence:  Synthetic peptide
PLPDGWEQAMTQDGEVYYINHKNKTTSWLDPRLD

SEQ ID NO: 1128 - protein, 34 aa, Artificial Sequence
  Description of Artificial Sequence:  Synthetic peptide
PLPPNWEARIDSHGRVFYVDHVNRTTTWQRPTAA

SEQ ID NO: 1129 - protein, 34 aa, Artificial Sequence
  Description of Artificial Sequence:  Synthetic peptide
ELPRGWEIKTDQQGKSFFVDHNSRATTFIDPRIP

SEQ ID NO: 1130 - protein, 35 aa, Artificial Sequence
  Description of Artificial Sequence:  Synthetic peptide
AKRPPLTACEILTTMREHLKGHETQTTCWDHPKMT

SEQ ID NO: 1131 - protein, 34 aa, Artificial Sequence
  Description of Artificial Sequence:  Synthetic peptide
SVKCTWTEHTSPDGFKYYYNGLTGESKWEKPEEM

SEQ ID NO: 1132 - protein, 37 aa, Artificial Sequence
  Description of Artificial Sequence:  Synthetic peptide
ALPPTEEIWVENKTPDGKVYYYNARTRESAWTKPDGV

SEQ ID NO: 1133 - protein, 34 aa, Artificial Sequence
  Description of Artificial Sequence:  Synthetic peptide
TAVSEWTEYKTADGKTYYYNNRTLESTWEKPQEL

SEQ ID NO: 1134 - protein, 34 aa, Artificial Sequence
  Description of Artificial Sequence:  Synthetic peptide
ILPPGWHSYLSPQGRRYYVNTTTNETTWERPSSS

SEQ ID NO: 1135 - protein, 35 aa, Artificial Sequence
  Description of Artificial Sequence:  Synthetic peptide
GLPEDWEVRHSQSKNLPYYFNSATKTSRWEPPSGT

SEQ ID NO: 1136 - protein, 34 aa, Artificial Sequence
  Description of Artificial Sequence:  Synthetic peptide
LSQCPWKEYKSDTGKPYYYNNQSQESRWTRPKDL

SEQ ID NO: 1137 - protein, 37 aa, Artificial Sequence
  Description of Artificial Sequence:  Synthetic peptide
GTGPPRALWSEHVAPDGRIYYYNADDKQSVWEKPSVL

SEQ ID NO: 1138 - protein, 34 aa, Artificial Sequence
  Description of Artificial Sequence:  Synthetic peptide
PLPAGWEMAKTSSGQRYFLNHIDQTTTWQDPRKA

SEQ ID NO: 1139 - protein, 34 aa, Artificial Sequence
  Description of Artificial Sequence:  Synthetic peptide
LRENGWKAAKTADGKVYYYNPTTRETSWTIPAFE

SEQ ID NO: 1140 - protein, 32 aa, Artificial Sequence
  Description of Artificial Sequence:  Synthetic peptide
MISWKEAKDASGRIYYYNTLTKKSTWEKPKEL

SEQ ID NO: 1141 - protein, 34 aa, Artificial Sequence
  Description of Artificial Sequence:  Synthetic peptide
PQQGQWKEFMSDDGKPYYYNTLTKKTQWVKPDGE

SEQ ID NO: 1142 - protein, 34 aa, Artificial Sequence
  Description of Artificial Sequence:  Synthetic peptide
SVESDWSVHTNEKGTPYYHNRVTKQTSWIKPDVL

SEQ ID NO: 1143 - protein, 34 aa, Artificial Sequence
  Description of Artificial Sequence:  Synthetic peptide
PLPENWAVEFTTENQPYYVDHANRRTHWVHPFVH

SEQ ID NO: 1144 - protein, 34 aa, Artificial Sequence
  Description of Artificial Sequence:  Synthetic peptide
LSQCPWKEYKSDTGKPYYYNNQSKESRWTRPKDL

SEQ ID NO: 1145 - protein, 37 aa, Artificial Sequence
  Description of Artificial Sequence:  Synthetic peptide
GAASGAKSWTEHKSPDGRTYYYNTETKQSTWEKPDDL

SEQ ID NO: 1146 - protein, 34 aa, Artificial Sequence
  Description of Artificial Sequence:  Synthetic peptide
LSKCPWKEYKSDSGKPYYYNSQTKESRWAKPKEL

SEQ ID NO: 1147 - protein, 34 aa, Artificial Sequence
  Description of Artificial Sequence:  Synthetic peptide
KTKYVWAIAKSEAGETYYYNKITKETQWTAPTPV

SEQ ID NO: 1148 - protein, 34 aa, Artificial Sequence
  Description of Artificial Sequence:  Synthetic peptide
LSKLAWKEYATADGKKYWYNVNTRESVWDIPDEY

SEQ ID NO: 1149 - protein, 34 aa, Artificial Sequence
  Description of Artificial Sequence:  Synthetic peptide
TVASDWHEVKTEDSRVYYYNSVTRKSVWEKPEEL

SEQ ID NO: 1150 - protein, 37 aa, Artificial Sequence
  Description of Artificial Sequence:  Synthetic peptide
SQTPPESHWKTYLDAKKRKFYVNHVTKETRWTKPDTL

SEQ ID NO: 1151 - protein, 35 aa, Artificial Sequence
  Description of Artificial Sequence:  Synthetic peptide
GLPTPWTVRYSKSKKREYFFNPETKHSQWEEPEGT

SEQ ID NO: 1152 - protein, 33 aa, Artificial Sequence
  Description of Artificial Sequence:  Synthetic peptide
MRGEWQEFKTPAGKKYYYNKNTKQSRWEKPNLK

SEQ ID NO: 1153 - protein, 35 aa, Artificial Sequence
  Description of Artificial Sequence:  Synthetic peptide
GLPAGWEVRHSNSKNLPYYFNPATRESRWEPPADT

SEQ ID NO: 1154 - protein, 34 aa, Artificial Sequence
  Description of Artificial Sequence:  Synthetic peptide
RTFAGWTEQMSSSGKMYYYNKKTEISQWDKPAEW

SEQ ID NO: 1155 - protein, 35 aa, Artificial Sequence
  Description of Artificial Sequence:  Synthetic peptide
GLPTPYTVRYSKSKKREYFFNPETKHSQWEEPEGT

SEQ ID NO: 1156 - protein, 35 aa, Artificial Sequence
  Description of Artificial Sequence:  Synthetic peptide
QNPDDAWNEFNAPDGRKYYFNSITQENTWEKPKAL

SEQ ID NO: 1157 - protein, 35 aa, Artificial Sequence
  Description of Artificial Sequence:  Synthetic peptide
TLPLGWVDAKDPASGATYYYNQHTGTCQWERPVEL

SEQ ID NO: 1158 - protein, 34 aa, Artificial Sequence
  Description of Artificial Sequence:  Synthetic peptide
GLPPGWEEKQDDRGRSYYVDHNSKTTTWSKPTMQ

SEQ ID NO: 1159 - protein, 34 aa, Artificial Sequence
  Description of Artificial Sequence:  Synthetic peptide
PLPPGWEQRVDQHGRVYYVDHVEKRTTWDRPEPL

SEQ ID NO: 1160 - protein, 34 aa, Artificial Sequence
  Description of Artificial Sequence:  Synthetic peptide
PLPPGWEMAKTPSGQRYFLNHIDQTTTWQDPRKA

SEQ ID NO: 1161 - protein, 34 aa, Artificial Sequence
  Description of Artificial Sequence:  Synthetic peptide
TLPSGWEQRKDPHGRTYYVDHNTRTTTWERPQPL

SEQ ID NO: 1162 - protein, 34 aa, Artificial Sequence
  Description of Artificial Sequence:  Synthetic peptide
PLPAGWEMAKTSSGQRYFLNHNDQTTTWQDPRKA

SEQ ID NO: 1163 - protein, 35 aa, Artificial Sequence
  Description of Artificial Sequence:  Synthetic peptide
KLPPGWEKRMSRSSGRVYYFNHITNASQWERPSGN

SEQ ID NO: 1164 - protein, 34 aa, Artificial Sequence
  Description of Artificial Sequence:  Synthetic peptide
ALPPGWEMKYTSEGVRYFVDHNTRTTTFKDPRPG

SEQ ID NO: 1165 - protein, 34 aa, Artificial Sequence
  Description of Artificial Sequence:  Synthetic peptide
GLPSGWEERKDAKGRTYYVNHNNRTTTWTRPIMQ

SEQ ID NO: 1166 - protein, 34 aa, Artificial Sequence
  Description of Artificial Sequence:  Synthetic peptide
KLPPGWEKRMSRSGRGYYFNHITNPSQWERPSGN

SEQ ID NO: 1167 - protein, 34 aa, Artificial Sequence
  Description of Artificial Sequence:  Synthetic peptide
VLPPNWKTARDPEGKIYYYHVITRQTQWDPPTWE

SEQ ID NO: 1168 - protein, 33 aa, Artificial Sequence
  Description of Artificial Sequence:  Synthetic peptide
LLPPNWETAYTNGDKYFIDHNTGTTTWDDPREL

SEQ ID NO: 1169 - protein, 33 aa, Artificial Sequence
  Description of Artificial Sequence:  Synthetic peptide
DLPAGWMRVQDTSGTYYWHIPTGTTQWEPPGRA

SEQ ID NO: 1170 - protein, 34 aa, Artificial Sequence
  Description of Artificial Sequence:  Synthetic peptide
SVQGPWERAISPNKVPYYINHETQTTCWDHPKMT

SEQ ID NO: 1171 - protein, 34 aa, Artificial Sequence
  Description of Artificial Sequence:  Synthetic peptide
CLPYGWEEAYTADGIKYFINHVTQTTSWIHPVMS

SEQ ID NO: 1172 - protein, 34 aa, Artificial Sequence
  Description of Artificial Sequence:  Synthetic peptide
PLPPGWTEHKAPSGIPYYWNAELKKSTYQRPSFI

SEQ ID NO: 1173 - protein, 35 aa, Artificial Sequence
  Description of Artificial Sequence:  Synthetic peptide
QLPDGWEKRTSRSTGMSYYLNMYTKESQWDQPTEP

SEQ ID NO: 1174 - protein, 34 aa, Artificial Sequence
  Description of Artificial Sequence:  Synthetic peptide
ELPEGYEQRTTVQGQVYFLHTQTGVSTWHDPRIP

SEQ ID NO: 1175 - protein, 34 aa, Artificial Sequence
  Description of Artificial Sequence:  Synthetic peptide
GLPYGWEQAKDNDGNTYYIDHLNRTTTYTDPRKT

SEQ ID NO: 1176 - protein, 33 aa, Artificial Sequence
  Description of Artificial Sequence:  Synthetic peptide
GLPPGWRKIHDAAGTYYWHVPSGSTQWQRPTWE

SEQ ID NO: 1177 - protein, 33 aa, Artificial Sequence
  Description of Artificial Sequence:  Synthetic peptide
DLPPGWKRVSDIAGTYYWHIPTGTTQWERPVSI

SEQ ID NO: 1178 - protein, 33 aa, Artificial Sequence
  Description of Artificial Sequence:  Synthetic peptide
GLPPGWRKIRDAAGTYYWHVPSGSTQWQRPTWE

SEQ ID NO: 1179 - protein, 34 aa, Artificial Sequence
  Description of Artificial Sequence:  Synthetic peptide
AVKTVWVEGLSEDGFTYYYNTETGESRWEKPDDF

SEQ ID NO: 1180 - protein, 33 aa, Artificial Sequence
  Description of Artificial Sequence:  Synthetic peptide
DLPPGWHVANDEDGDPYYYHDDGRNQWVRPGAG

SEQ ID NO: 1181 - protein, 33 aa, Artificial Sequence
  Description of Artificial Sequence:  Synthetic peptide
HLLPGWHVAYDEVGDPYYYHDDGRSQWDAPLNT

SEQ ID NO: 1182 - protein, 34 aa, Artificial Sequence
  Description of Artificial Sequence:  Synthetic peptide
AAKAVWVEGLSEDGYTYYYNTETGESKWEKPEDF

SEQ ID NO: 1183 - protein, 34 aa, Artificial Sequence
  Description of Artificial Sequence:  Synthetic peptide
ASKGGWVEGVTADGHCYYYDLITGASQWEKPEGF

SEQ ID NO: 1184 - protein, 34 aa, Artificial Sequence
  Description of Artificial Sequence:  Synthetic peptide
PLPPGWEERIHMDGRTFYIDHNTKITQWDPRLQN

SEQ ID NO: 1185 - protein, 34 aa, Artificial Sequence
  Description of Artificial Sequence:  Synthetic peptide
PLPPGWEERQDVLGRTYYVNHESRRTQWKRPDDD

SEQ ID NO: 1186 - protein, 34 aa, Artificial Sequence
  Description of Artificial Sequence:  Synthetic peptide
LLPPNWETAYTENGDKYFIDHNTGTTTWDDPREL

SEQ ID NO: 1187 - protein, 34 aa, Artificial Sequence
  Description of Artificial Sequence:  Synthetic peptide
GAKSMWTEHKSPDGRTYYYNTETKQSTWEKPDDL

SEQ ID NO: 1188 - protein, 34 aa, Artificial Sequence
  Description of Artificial Sequence:  Synthetic peptide
PSKGRWVEGITSEGYHYYYDLISGASQWEKPEGF

SEQ ID NO: 1189 - protein, 34 aa, Artificial Sequence
  Description of Artificial Sequence:  Synthetic peptide
  MOD_RES (22): x = any natural occuring amino acid
AAKAIWVEGLSEDGYTYYYNTXTGQSKMGKPDDF

SEQ ID NO: 1190 - protein, 25 aa, Artificial Sequence
  Description of Artificial Sequence:  Synthetic peptide
VTADGHCYYYDLVTGASQWEKPEGF

SEQ ID NO: 1191 - protein, 101 aa, Artificial Sequence
  Description of Artificial Sequence:  Synthetic peptide
YSFVTEENTFEVKLFKNSSGLGFSFSREDNLIPEQINASIVRVKKLFPGQPAAESGKIDVGDVILKVNGASLKGLSQQEVISALRGTAPEVFLLLCRPPPG

SEQ ID NO: 1192 - protein, 99 aa, Artificial Sequence
  Description of Artificial Sequence:  Synthetic peptide
IVSSPEREITLVNLKKDAKYGLGFQIIGGEKMGRLDLGIFISSVAPGGPADFHGCLKPGDRLISVNSVSLEGVSHHAAIEILQNAPEDVTLVISQPKEK

SEQ ID NO: 1193 - protein, 96 aa, Artificial Sequence
  Description of Artificial Sequence:  Synthetic peptide
LPEALLLQRRRVTVRKADAGGLGISIKGGRENKMPILISKIFKGLAADQTEALFVGDAILSVNGEDLSSATHDEAVQVLKKTGKEVVLEVKYMKDV

SEQ ID NO: 1194 - protein, 100 aa, Artificial Sequence
  Description of Artificial Sequence:  Synthetic peptide
IHFSKSENCKDVFIEKQKGEILGVVIVESGWGSILPTVIIANMMHGGPAEKSGKLNIGDQIMSINGTSLVGLPLSTCQSIIKGLENQSRVKLNIVRCPPV

SEQ ID NO: 1195 - protein, 99 aa, Artificial Sequence
  Description of Artificial Sequence:  Synthetic peptide
EATLKQLDSIHVTILHKEEGAGLGFSLAGGADLENKVITVHRVFPNGLASQEGTIQKGNEVLSINGKSLKGATHNDALAILRQARDPRQAVIVTRRTTV

SEQ ID NO: 1196 - protein, 95 aa, Artificial Sequence
  Description of Artificial Sequence:  Synthetic peptide
GVQQIQPNVISVRLFKRKVGGLGFLVKERVSKPPVIISDLIRGGAAEQSGLIQAGDIILAVNDRPLVDLSYDSALEVLRGIASETHVVLILRGPE

SEQ ID NO: 1197 - protein, 95 aa, Artificial Sequence
  Description of Artificial Sequence:  Synthetic peptide
GVQQIQPNVISVRLFKRKVGGLGFLVKERVSKPPVIISDLIRGGAAEQSGLIQAGDIILAVNGRPLVDLSYDSALEVLRGVASETHVVLILRGPE

SEQ ID NO: 1198 - protein, 99 aa, Artificial Sequence
  Description of Artificial Sequence:  Synthetic peptide
VESSAEATVYTVTLEKMSAGLGFSLEGGKGSLHGDKPLTINRIFKGAASEQSETIQPGDEILQLAGTAMQGLTRFEAWNTIKALPDGPVTIVIRRKSLQ

SEQ ID NO: 1199 - protein, 100 aa, Artificial Sequence
  Description of Artificial Sequence:  Synthetic peptide
IHFSNSENCKELQLEKHKGEILGVVVVESGWGSILPTVILANMMNGGPAARSGKLSIGDQIMSINGTSLVGLPLATCQGIIKGLKNQTQVKLNIVSCPPV

SEQ ID NO: 1200 - protein, 101 aa, Artificial Sequence
  Description of Artificial Sequence:  Synthetic peptide
TDSTMSLNIITVTLNMEKYNFLGISIVGQSNERGDGGIYIGSIMKGGAVAADGRIEPGDMLLQVNDINFENMSNDDAVRVLRDIVHKPGPIVLTVAKCWDP

SEQ ID NO: 1201 - protein, 95 aa, Artificial Sequence
  Description of Artificial Sequence:  Synthetic peptide
LPEALLLQRRRVTVRKADAGGLGISIKGGRENKMPILISKIFKGLMDQTEALFVGDAILSVNGEDLSSATHDEAVQVLKKTGKEVVLEVKYMKDV

SEQ ID NO: 1202 - protein, 93 aa, Artificial Sequence
  Description of Artificial Sequence:  Synthetic peptide
LEDFELEVELLITLIKSEKGSLGFTVTKGNQRIGCYVHDVIQDPAKSDGRLKPGDRLIKVNDTDVTNMTHTDAVNLLRGSKTVRLVIGRVLEL

SEQ ID NO: 1203 - protein, 101 aa, Artificial Sequence
  Description of Artificial Sequence:  Synthetic peptide
TDSTMSLNIITVTLNMEKYNFLGISIVGQSNERGDGGIYIGSIMKGGAVAADGRIEPGDMLLQVNDMNFENMSNDDAVRVLRDIVHKPGPIVLTVAKCWGP

SEQ ID NO: 1204 - protein, 88 aa, Artificial Sequence
  Description of Artificial Sequence:  Synthetic peptide
RAISLEGEPRKVVLHKGSTGLGFNIVGGEDGEGIFVSFIADLSGELQRRKQILSVNGIHLPGDSHEQALPLKGAGQTVTIIAQYQPED

SEQ ID NO: 1205 - protein, 103 aa, Artificial Sequence
  Description of Artificial Sequence:  Synthetic peptide
  MOD_RES (42): x = any natural occuring amino acid
GFASHSLQTSDVVIHRKENEGFGFVIISSLNRPESGSTITVXHKIGRIIDGSPADRCAKLKVGDRILAVNGQSIINMPHADIVKLIKDAGLSVTLRIIPQEEL

SEQ ID NO: 1206 - protein, 95 aa, Artificial Sequence
  Description of Artificial Sequence:  Synthetic peptide
LNSAGPSGSYDVLLHRNENDGFGFVLMSSQHKNGSTVGQIQPGSPAARCGRLSVGDRVIAVNGIDILSLSHPDTISLIKDSGLSVRLTIAPPNTA

SEQ ID NO: 1207 - protein, 107 aa, Artificial Sequence
  Description of Artificial Sequence:  Synthetic peptide
LYSDCIIEDKTVVLQKKDNEGFGFVLRGAKADTPIEEFTPTPAFPALQYLESVDEGGVAWQAGLRTGDFLIEVNNENVVKVGHRQVVNMIRQGGNHLVLKVVTVTRN

SEQ ID NO: 1208 - protein, 102 aa, Artificial Sequence
  Description of Artificial Sequence:  Synthetic peptide
AGQVVHTETTEVVLTADPVTGFGIQLQGSVFATETLSSPPLISYIEADSPAERCGVLQIGDRVMAINGIPTEDSTFEEANQLLRDSSITSKVTLEIEFDVAE

SEQ ID NO: 1209 - protein, 100 aa, Artificial Sequence
  Description of Artificial Sequence:  Synthetic peptide
VGDRTTWEYHTVAVTRVPGYGFGIAVSGGRDNPHFANGDPSIAVSDVLKGGPAEDRLQVNDRIISVNGVSLENVEYATAVQVLRDSGNTVQLVVKRRVPL

SEQ ID NO: 1210 - protein, 95 aa, Artificial Sequence
  Description of Artificial Sequence:  Synthetic peptide
MEELTIWEQHTATLCRDPRRGFGIAISGGRDRASGSVVVSDVVPGGPADGRLQTGDHVVMVNGVSMESVTSTFAIQILKTCTKLANITVKRPRKI

SEQ ID NO: 1211 - protein, 99 aa, Artificial Sequence
  Description of Artificial Sequence:  Synthetic peptide
NWESTKFELIDVALHRDPALGLGITVAGYVHKKEEIGGIFVKSLVPRSAASSSGVIKVHDLILEVNGTTLEHMSHADSVRTLVKSGDQVKLKLVRFPLS

SEQ ID NO: 1212 - protein, 99 aa, Artificial Sequence
  Description of Artificial Sequence:  Synthetic peptide
IVSSPEREITLVNLKKDAKYGLGFQIIGGEKMGRLDLGIFISSVAPGGPADLDGCLKPGDRLISVNSVSLEGVSHHAAIEILQNAPEDVTLVISQPKEK

SEQ ID NO: 1213 - protein, 99 aa, Artificial Sequence
  Description of Artificial Sequence:  Synthetic peptide
IASSPEREITLVNLKKDAQYGLGFQIIGGEKMGRLDLGVFISSVTPGGPADLDGCLKPGDRLISVNSVSLEGVSHHAAVEILQNAPEDVTLVISQPKEK

SEQ ID NO: 1214 - protein, 99 aa, Artificial Sequence
  Description of Artificial Sequence:  Synthetic peptide
IVSSPEREITLVNLKKDPKHGLGFQIIGGEKMGRLDLGVFISAVTPGGPADLDGCLKPGDRLISVNSVSLEGVSHHAAVDILQNAPEDVTLVISQPKEK

SEQ ID NO: 1215 - protein, 100 aa, Artificial Sequence
  Description of Artificial Sequence:  Synthetic peptide
QESVPLEALTVVEIEKTSKGFGFNIVGGTDNPHFVGDIGIYVSSVNSESKSYGVVRTGDKILSFDGIDMTYKTHDEAVEVFRSVKIGHVAKMLIDREYLH

SEQ ID NO: 1216 - protein, 106 aa, Artificial Sequence
  Description of Artificial Sequence:  Synthetic peptide
AAGHETNIARILVIPRGVKGFGFILRGAKHVAMPLNFEPTAQVPALQFFEGVDMSGMAVRAGLRPGDYLLEIDGIDVRRCSHDEVVEFIQQAGDTITLKVITVDVA

SEQ ID NO: 1217 - protein, 91 aa, Artificial Sequence
  Description of Artificial Sequence:  Synthetic peptide
STKNRWQLVGPVHMTRGEGGFGFTLRGDSPVLIAAVVPGGQAESAGLKEGDYIVSVNGQPCKWWKHLEVVTQLRSMGEEGVSLQVVVTQAL

SEQ ID NO: 1218 - protein, 97 aa, Artificial Sequence
  Description of Artificial Sequence:  Synthetic peptide
ENRLPDYQEQDIFLWRKETGFGFRILGGNEPGEPIYIGHIVPLGAADTDGRLRSGDELICVDGTPVIGKSHQLVVQLMQQAAKQGHVNLTVRRKVVF

SEQ ID NO: 1219 - protein, 97 aa, Artificial Sequence
  Description of Artificial Sequence:  Synthetic peptide
DSSGPDYKELDVHLRRMESGFGFRILGGDEPGQPILIGAVIAMGSADRDGRLHPGDELVYVDGIPVAGKTHRYVIDLMHHAARNGQVNLTVRRKVLC

SEQ ID NO: 1220 - protein, 97 aa, Artificial Sequence
  Description of Artificial Sequence:  Synthetic peptide
QYNQKPSDLITVSLIRKPVGFGFRLLGGVESKTPLSVGQIVIGGAAEEDGRLQEGDEIVEIDGHNVEGASHSEAVVLLEAAAQNKHVKLIVRRPSRT

SEQ ID NO: 1221 - protein, 95 aa, Artificial Sequence
  Description of Artificial Sequence:  Synthetic peptide
PQAAQEQDFYTVELERGAKGFGFSLRGGREYNMDLYVLRLAEDGPAERCGKMRIGDEILEINGETTKNMKHSRAIELIKNGGRRVRLFLRRGDGS

SEQ ID NO: 1222 - protein, 95 aa, Artificial Sequence
  Description of Artificial Sequence:  Synthetic peptide
YRQPQDFDYFTVDMEKGAKGFGFSIRGGREYKMDLYVLRLAEDGPAIRNGRMRVGDQIIEINGESTRDMTHARAIELIKSGGRRVRLLLKRGTGS

SEQ ID NO: 1223 - protein, 95 aa, Artificial Sequence
  Description of Artificial Sequence:  Synthetic peptide
DRMSMNGNLIDVTLERGTKGFGFSIRGGQEFGSMPLFVLRIADDGPAKADGRLQVGDQLTTINGQSTKGMSHDDAIRIIKQHTMVNLTVLRNRLP

SEQ ID NO: 1224 - protein, 93 aa, Artificial Sequence
  Description of Artificial Sequence:  Synthetic peptide
SSIATQPELITVHIVKGPMGFGFTIADSPGGGGQRVKQIVDSPRCRGLKEGDLIVEVNKKNVQALTHNQVVDMLIECPKGSEVTLLVQRGGLP

SEQ ID NO: 1225 - protein, 91 aa, Artificial Sequence
  Description of Artificial Sequence:  Synthetic peptide
SSGATQAELMTLTIVKGAQGFGFTIADSPTGQRVKQILDIQGCPGLCEGDLIVEINQQNVQNLSHTEVVDILKDCPIGSETSLIIHRGGFF

SEQ ID NO: 1226 - protein, 91 aa, Artificial Sequence
  Description of Artificial Sequence:  Synthetic peptide
YAAAKSRDLHEIDIFKGSEGFGFTIADNLNGQRIKKILFPSQCPNLMEGDTIVELDGRNVRPIPHTQLVDMLRERPIGYRGKLVVKRGSPK

SEQ ID NO: 1227 - protein, 102 aa, Artificial Sequence
  Description of Artificial Sequence:  Synthetic peptide
AASSSTAPSKTITIRKGPFGFGFTLKSVRVYLGEHSEYYTIEHIVTAVVEGSPAFHANLQAEDMITHVNGHPVHNLTHPQLMHRLLANGNELILRLVPLANT

SEQ ID NO: 1228 - protein, 97 aa, Artificial Sequence
  Description of Artificial Sequence:  Synthetic peptide
NPSELKGKFIHTKLRKSSRGFGFTVVGGDEPDEFLQIKSLVLDGPAALDGKMETGDVIVSVNDTCVLGHTHAQVVKIFQSIPIGASVDLELCRGYPL

SEQ ID NO: 1229 - protein, 97 aa, Artificial Sequence
  Description of Artificial Sequence:  Synthetic peptide
DASQLKGTFLSTTLKKSNMGFGFTIIGGDEPDEFLQVKSVIPDGPAAQDGKMETGDVIVYINEVCVLGHTHADVVKLFQSVPIGQSVNLVLCRGYPL

SEQ ID NO: 1230 - protein, 100 aa, Artificial Sequence
  Description of Artificial Sequence:  Synthetic peptide
DPARLGGELISTKIVKGAKGLGFTLIGNDSSSRGDEFIQVKSVLSGGPAAANGVLRSGDILVRVNGRLLLGATQKEACDVFVAIPVNEAVDIQVCRGYEL

SEQ ID NO: 1231 - protein, 106 aa, Artificial Sequence
  Description of Artificial Sequence:  Synthetic peptide
PQIIFNPRPHVVKVVKSETGFGFNVKGQVSEGGQLRSLNGQLYAPLQHVSAVLRRGAADQAGLRKGDRILEVNGLNVEGSTHRKVVDLIKNGGDELTMIVISVEDP

SEQ ID NO: 1232 - protein, 97 aa, Artificial Sequence
  Description of Artificial Sequence:  Synthetic peptide
ETFLENATRQVVIVKKPDSGFGLSIKGGSENAQNMPIVISKIFKGLPADECGELFIGDAIVEVNGISIEGQSHDEVVNMLKSSGDQVTLGVRHFTHM

SEQ ID NO: 1233 - protein, 90 aa, Artificial Sequence
  Description of Artificial Sequence:  Synthetic peptide
LPGPSPPRVRSVEVARGRAGYGFTLSGQAPCVLSCVMRGSPADFVGLRAGDQILAVNEINVKKASHEDVVKLIGKCSGVLHMVIAEGVGR

SEQ ID NO: 1234 - protein, 90 aa, Artificial Sequence
  Description of Artificial Sequence:  Synthetic peptide
QSGPAPPRVRSVEVARGRAGYGFTLSGQAPCVLSCVMRGSPADFVGLRAGDQILAINEINVKKASHEDVVKLIGKCSGVLRMVISEGSSH

SEQ ID NO: 1235 - protein, 90 aa, Artificial Sequence
  Description of Artificial Sequence:  Synthetic peptide
LLPHQPRIVEMKKGSNGYGFYLRAGSEQKGQIIKDIDSGSPAEEAGLKNNDLVVAVNGESVETLDHDSVVEMIRKGGDQTSLLVVDKETD

SEQ ID NO: 1236 - protein, 90 aa, Artificial Sequence
  Description of Artificial Sequence:  Synthetic peptide
SCQIIPPAPRKVEMRRDPVLGFGFVAGSEKPVVVRSVTPGGPSEGKLIPGDQIVMINDEPVSAAPRERVIDLVRSCKESILLTVIQPYPS

SEQ ID NO: 1237 - protein, 96 aa, Artificial Sequence
  Description of Artificial Sequence:  Synthetic peptide
RYADLPGELHIIELEKDKNGLGLSLAGNKDRSRMSIFVVGINPEGPAAADGRMRIGDELLEINNQILYGRSHQNASAIIKTAPSKVKLVFIVQSLG

SEQ ID NO: 1238 - protein, 96 aa, Artificial Sequence
  Description of Artificial Sequence:  Synthetic peptide
RYGTLTGQLHMIELEKGHSGLGLSLAGNKDRTRMSVFIVGIDPTGAAGRDGRLQIADELLEINGQILYGRSHQNASSIIKCAPSKVKIIFIRNADH

SEQ ID NO: 1239 - protein, 96 aa, Artificial Sequence
  Description of Artificial Sequence:  Synthetic peptide
TCPIVPGQEMIIEISKGRSGLGLSIVGGKDTPLNAIVIHEVYEEGAAARDGRLWAGDQILEVNGVDLRNSSHEEAITALRQTPQKVRLVVYRDEAH

SEQ ID NO: 1240 - protein, 95 aa, Artificial Sequence
  Description of Artificial Sequence:  Synthetic peptide
IFAHVKGQRKEVEVFKSEDALGLTITDNGAGYAFIKRIKEGSVIDHIHLISVGDMIEAINGQSLLGCRHYEVARLLKELPRGRTFTLKLTEPRKA

SEQ ID NO: 1241 - protein, 101 aa, Artificial Sequence
  Description of Artificial Sequence:  Synthetic peptide
EKRVERLELFPVELEKDSEGLGISIIGMGAGADMGLEKLGIFVKTVTEGGAAHRDGRIQVNDLLVEVDGTSLVGVTQSFAASVLRNTKGRVRFMIGRERPG

SEQ ID NO: 1242 - protein, 101 aa, Artificial Sequence
  Description of Artificial Sequence:  Synthetic peptide
EKRVEKLELFPVELEKDEDGLGISIIGMGVGADAGLEKLGIFVKTVTEGGAAQRDGRIQVNDQIVEVDGISLVGVTQNFAATVLRNTKGNVRFVIGREKPG

SEQ ID NO: 1243 - protein, 101 aa, Artificial Sequence
  Description of Artificial Sequence:  Synthetic peptide
ERRLERMDLFEVDLEKGAEGLGVSIIGMGVGADSGLEKLGIFVKSITPGGAVHRDGRIRVCDQIVSVDGKSLVGVSQLYAANTLRSTSNRVTFTIGREQNL

SEQ ID NO: 1244 - protein, 101 aa, Artificial Sequence
  Description of Artificial Sequence:  Synthetic peptide
YSFVTEDNTFEVKLFKNSSGLGFSFSREDNLIPEQINGSIVRVKKLFPGQPAAESGKIDVGDVILKVNGAPLKGLSQQDVISALRGTAPEVSLLLCRPAPG

SEQ ID NO: 1245 - protein, 101 aa, Artificial Sequence
  Description of Artificial Sequence:  Synthetic peptide
YSFVTEENTFEVKLFKNSSGLGFSFSREDNLIPEQINASIVRVKKLFAGQPAAESGKIDVGDVILKVNGASLKGLSQQEVISALRGTAPEVFLLLCRPPPG

SEQ ID NO: 1246 - protein, 101 aa, Artificial Sequence
  Description of Artificial Sequence:  Synthetic peptide
YSFVTEENTFEVKLLKNSSGLGFSFSREDNVIPEQMNTSIVRVKKLFPGQPAAESGQIDVGDVILKVNGASLKGLSQQEVISALRGTSPEVSLLLCRPPPG

SEQ ID NO: 1247 - protein, 101 aa, Artificial Sequence
  Description of Artificial Sequence:  Synthetic peptide
TTALLLKIIFEVKLFKNSSGLGFSFSREDNLIPEQINGSIVRVKKLFPGQPAAESGKIDVGDVILKVNGAPLKGLSQQDVISALRGTAPEVSLLLCRPAPG

SEQ ID NO: 1248 - protein, 100 aa, Artificial Sequence
  Description of Artificial Sequence:  Synthetic peptide
PLAMWEAGIQAIELEKGSRGLGFSILDYQDPIDPANTVIVIRSLVPGGIAEKDGRLFPGDRLMFVNDINLENSTLEEAVEALKGAPSGMVRIGVAKPLPL

SEQ ID NO: 1249 - protein, 98 aa, Artificial Sequence
  Description of Artificial Sequence:  Synthetic peptide
GLAVWNCVPLVIHLCKDSRGLGFSIVDYKDPTHRDESVIVVQSLVPGGVAQADGRVVPGDRLLFVNNHDLSNSRHPVPLQVRKLCGLVQLNNIESFIL

SEQ ID NO: 1250 - protein, 100 aa, Artificial Sequence
  Description of Artificial Sequence:  Synthetic peptide
ELALWSPEVKIVELVKDCKGLGFSILDYQDPLDPTRSVIVIRSLVADGVAERSGGLLPGDRLVSVNEYRLDNTSLAEAVEILKAVPPGLVHLGICKPLVE

SEQ ID NO: 1251 - protein, 103 aa, Artificial Sequence
  Description of Artificial Sequence:  Synthetic peptide
SSPPKPGDIFEVELAKNDNSLGISVTVLFDKGGVNTSVRHGGIYVKAVIPQGAAESDGRIHKGDRVLAVNGVSLEGATHKQAVETLRNTGQVVHLLLEKGQSP

SEQ ID NO: 1252 - protein, 98 aa, Artificial Sequence
  Description of Artificial Sequence:  Synthetic peptide
SSPPKPGDIFEVELAKNDNSLGISVTGGVNTSVRHGGIYVKAVIPQGAAESDGRIHKGDRVLAVNGVSLEGATHKQAVETLRNTGQVVHLLLEKGQSP

SEQ ID NO: 1253 - protein, 98 aa, Artificial Sequence
  Description of Artificial Sequence:  Synthetic peptide
SSPPKPGDIFEVELAKNDNSLGISVTGGVNTSVRHGGIYVKAVIPKGAAESDGRIHKGDRVLAVNGVSLEGATHKQAVETLRNTGQVVHLLLEKGQSP

SEQ ID NO: 1254 - protein, 98 aa, Artificial Sequence
  Description of Artificial Sequence:  Synthetic peptide
ASPPKPGDTKEVELAKTDGSLGISVTGGVNTSVRHGGIYVKAIIPKGAAESDGRIHKGDRVLAVNGVSLEGATHKQAVETLRNTGQVVHLLLEKGQVP

SEQ ID NO: 1255 - protein, 95 aa, Artificial Sequence
  Description of Artificial Sequence:  Synthetic peptide
AASEGHSHPRVVELPKTDEGLGFNVMGGKEQNSPIYISRIIPGGVAERHGGLKRGDQLLSVNGVSVEGEHHEKAVELLKAAKDSVKLVVRYTPKV

SEQ ID NO: 1256 - protein, 95 aa, Artificial Sequence
  Description of Artificial Sequence:  Synthetic peptide
  MOD_RES (41): x = any natural occuring amino acid
AASEGHAHPRVIELPKTNEGLGFNVMGGKEQNSPIYISRMXPGGVADRHGGLKRGDQLLSVNGISVESEHHERAVELLKLAQGTVKLVVRYTPRI

SEQ ID NO: 1257 - protein, 94 aa, Artificial Sequence
  Description of Artificial Sequence:  Synthetic peptide
AAAEGHAHPRIVELPKTDQGLGFNVMGGKEQNSPIYISRIIPGGVADRHGGLKRGDQLIAVNGNVEAECHEKAVDLLKSAVGSVKLVIRYMPKL

SEQ ID NO: 1258 - protein, 99 aa, Artificial Sequence
  Description of Artificial Sequence:  Synthetic peptide
VESTAEATVCTVTLEKMSAGLGFSLEGGKGSLHGDKPLTINRIFKGAASEQSETVQPGDEILQLGGTAMQGLTRFEAWNIIKALPDGPVTIVIRRKSLQ

SEQ ID NO: 1259 - protein, 99 aa, Artificial Sequence
  Description of Artificial Sequence:  Synthetic peptide
VDSTAEATVCTVTLEKMSGGLGFSLEGGKGSLQGDKPLTINRIFKGAASEQSETVQPGDEILHLAGTAMQGLTRFEAWNIIKALPDGPVTIVIKRKSMQ

SEQ ID NO: 1260 - protein, 99 aa, Artificial Sequence
  Description of Artificial Sequence:  Synthetic peptide
VESSAEATVYTVTLEKMSAGLGFSLEGGKGSLHGDKPLTINRIFKGAASEQSETIQPGDEILQLAGTAMQGLTRFEAWNIIKALPDGPVTTVIRRKSLQ

SEQ ID NO: 1261 - protein, 99 aa, Artificial Sequence
  Description of Artificial Sequence:  Synthetic peptide
SGDSTEATVHTVTLEKTSAGLGFSLEGGKGSLLGDKPLTVNRIFKGAASEQSETIQPGDEILHLAGTAVQGLTRFEAWNVIKTLPDGPVTIVIRRRSVQ

SEQ ID NO: 1262 - protein, 99 aa, Artificial Sequence
  Description of Artificial Sequence:  Synthetic peptide
GRSVAVHDALCVEVLKTSAGLGLSLDGGKSSVTGDGPLVIKRVYKGGAAEQAGIIEAGDEILAINGKPLVGLMHFDAWNIMKSVPEGPVQLLIRKHRNS

SEQ ID NO: 1263 - protein, 97 aa, Artificial Sequence
  Description of Artificial Sequence:  Synthetic peptide
QPLRKEPEIITVTLKKQNGMGLSIVAAKGAGQDKLGIYVKSVVKGGAADVDGRLAAGDQLLSVDGRSLVGLSQERAAELMTRTSSVVTLEVAKQGAI

SEQ ID NO: 1264 - protein, 97 aa, Artificial Sequence
  Description of Artificial Sequence:  Synthetic peptide
QPLRKEPEVITVTLKKQNGMGLSIVAAKGAGQDKLGIYVKSVVKGGAADVDGRLAAGDQLLSVDGRSLVGLSQERAAELMTRTSSVVTLEVAKQGAI

SEQ ID NO: 1265 - protein, 98 aa, Artificial Sequence
  Description of Artificial Sequence:  Synthetic peptide
SNKLPQPELQLIKLHKNSNGMGLSIVASKGAGQEKLGIYIKSVVPGGAADADGRLQAGDQLLRVDGQSLIGITQERAADYLVRTGPVVSLEVAKQGAI

SEQ ID NO: 1266 - protein, 94 aa, Artificial Sequence
  Description of Artificial Sequence:  Synthetic peptide
AEEDFTREPRKIILHKGSTGLGFNIVGGEDGEGIFVSFILAGGPADLSGELRRGDRILSVNGVNLRNATHEQAAAALKRAGQSVTIVAQYRPEE

SEQ ID NO: 1267 - protein, 94 aa, Artificial Sequence
  Description of Artificial Sequence:  Synthetic peptide
GEEDIPREPRRIVIHRGSTGLGFNIVGGEDGEGIFISFILAGGPADLSGELRKGDQILSVNGVDLRNASHEQAAIALKNAGQTVTIIAQYKPEE

SEQ ID NO: 1268 - protein, 94 aa, Artificial Sequence
  Description of Artificial Sequence:  Synthetic peptide
GDDEITREPRKVVLHRGSTGLGFNIVGGEDGEGIFISFILAGGPADLSGELRKGDRIISVNSVDLRAASHEQAAAALKNAGQAVTIVAQYRPEE

SEQ ID NO: 1269 - protein, 94 aa, Artificial Sequence
  Description of Artificial Sequence:  Synthetic peptide
GDDEITREPRKVVLHRGSTGLGFNIVAGEDGEGIFISFILAGGPADLSGELRKGDRIISVNSVDLRAASHEQAAAALKNAGQAVTIVAQYRPEE

SEQ ID NO: 1270 - protein, 94 aa, Artificial Sequence
  Description of Artificial Sequence:  Synthetic peptide
RAISLEGEPRKVVLHKGSTGLGFNIVGGEDGEGIFVSFILAGGPADLSGELQRGDQILSVNGIDLRGASHEQAAAALKGAGQTVTIIAQYQPED

SEQ ID NO: 1271 - protein, 94 aa, Artificial Sequence
  Description of Artificial Sequence:  Synthetic peptide
APIAIPLEPRPVQLVKGQNGLGFNIVGGEDNEPIYISFVLPGGVADLSGNVKTGDVLLEVNGVVLRNATHKEAAEALRNAGNPVYLTLQYRPQE

SEQ ID NO: 1272 - protein, 94 aa, Artificial Sequence
  Description of Artificial Sequence:  Synthetic peptide
STEDITREPRTITIQKGPQGLGFNIVGGEDGQGIYVSFILAGGPADLGSELKRGDQLLSVNNVNLTHATHEEAAQALKTSGGVVTLLAQYRPEE

SEQ ID NO: 1273 - protein, 90 aa, Artificial Sequence
  Description of Artificial Sequence:  Synthetic peptide
KDRPYVEEPRHVKVQKGSEPLGISIVSGEKGGIYVSKVTVGSIAHQAGLEYGDQLLEFNGINLRSATEQQARLIIGQQCDTITILAQYNP

SEQ ID NO: 1274 - protein, 99 aa, Artificial Sequence
  Description of Artificial Sequence:  Synthetic peptide
VVFLPTHLERTVKLQKGALPLGAVLDGDKDKGVNGCVVKSICGKKAVALDGRIQVGDFITKINTESLRNVTNSQARAILKRTNLVGTFCNVTYITSADA

SEQ ID NO: 1275 - protein, 101 aa, Artificial Sequence
  Description of Artificial Sequence:  Synthetic peptide
GSDSSLFETYNVELVRKDGQSLGIRIVGYVGTSHTGEASGIYVKSIIPGSAAYHNGHIQVNDKIVAVDGVNIQGFANHDVVEVLRNAGQVVHLTLVRRKTS

SEQ ID NO: 1276 - protein, 99 aa, Artificial Sequence
  Description of Artificial Sequence:  Synthetic peptide
TQKNEESETFDVELTKNVQGLGITIAGYIGDKKLEPSGIFVKSITKSSAVELDGRIQIGDQIVAVDGTNLQGFTNQQAVEVLRHTGQTVRLTLMRKGAS

SEQ ID NO: 1277 - protein, 101 aa, Artificial Sequence
  Description of Artificial Sequence:  Synthetic peptide
TDSTMSLNIITVTLNMEKYNFLGISIVGQSNERGDGGIYIGSIMKGGAVAADGRIEPGDMLLQVNEINFENMSNDDAVRVLREIVHKPGPITLTVAKCWDP

SEQ ID NO: 1278 - protein, 101 aa, Artificial Sequence
  Description of Artificial Sequence:  Synthetic peptide
TDSTMSLNIITVTLNMEKYNFLGISIVGQSNERGDGGIYIGSIMKGGAVAADGRIEPGDMLLQVNDMNFENMSNDDAVRVLRDIVHKPGPIVLTVAKCWDP

SEQ ID NO: 1279 - protein, 101 aa, Artificial Sequence
  Description of Artificial Sequence:  Synthetic peptide
SDSAMSLNIITVTLNMEKYNFLGISIVGQSNERGDGGIYIGSIMKGGAVAADGRIEPGDMLLQVKEINFENMSNDDAVRVLREIVHKPGPITLTVAKCWDP

SEQ ID NO: 1280 - protein, 101 aa, Artificial Sequence
  Description of Artificial Sequence:  Synthetic peptide
TDSTMSLNIITVTLNMERHHFLGISIVGQSNDRGDGGIYIGSIMKGGAVAADGRIEPGDMLLQVNDVNFENMSNDDAVRVLREIVSQTGPISLTVAKCWDP

SEQ ID NO: 1281 - protein, 101 aa, Artificial Sequence
  Description of Artificial Sequence:  Synthetic peptide
TDSTMSLNIITVSINMEAVNFLGISIVGQSNRGGNGGIYVGSIMKGGAVALDGRIEPGDMILQVNDVNFENMTNDEAVRVLREVVQKPGPIKLVVAKCWDP

SEQ ID NO: 1282 - protein, 87 aa, Artificial Sequence
  Description of Artificial Sequence:  Synthetic peptide
NSEKYNFLGISIVGQSNERGDGGIYIGSIMKGGAVAADGRIEPGDMLLQVNEINFENMSNDDAVRVLREIVHKPGPITLTVAKCWDP

SEQ ID NO: 1283 - protein, 101 aa, Artificial Sequence
  Description of Artificial Sequence:  Synthetic peptide
TESSMSLDVITVNLNMDTVNFLGISIVGQTSNCGDNGIYVANIMKGGAVALDGRIEAGDMILQVNETSFENFTNDQAVDVLREAVSRRGPIKLTVAKSFEN

SEQ ID NO: 1284 - protein, 97 aa, Artificial Sequence
  Description of Artificial Sequence:  Synthetic peptide
YKEEDVCDTFTIELQLQKRPGKGLGLSIVGKRNDTGVFVSDIVKGGIADADGRLMQGDQILMVNGEDVRHATQEAVAALLKCSLGAVTLEVGRVKAA

SEQ ID NO: 1285 - protein, 95 aa, Artificial Sequence
  Description of Artificial Sequence:  Synthetic peptide
YKEEDVCDTFTVELQKRPGKGLGLSIVGKRNDTGVFVSDIVKGGIADADGRLMQGDQILMVNGEDVRNATQEAVAALLKCSLGTVTLEVGRIKAA

SEQ ID NO: 1286 - protein, 95 aa, Artificial Sequence
  Description of Artificial Sequence:  Synthetic peptide
YRDEENLEVFLVDLQKKTGRGLGLSIVGKRSGSGVFISDIVKGGAADLDGRLIRGDQILSVNGEDMRHASQETVATILKCVQGLVQLEIGRLRAG

SEQ ID NO: 1287 - protein, 95 aa, Artificial Sequence
  Description of Artificial Sequence:  Synthetic peptide
LDPTQIYNIFEIDLVKKTGRGLGISIVGRKNEPGVYVSEIVKGGLAESDGRLMTGDQILEVNGKDVRGCMQEDVAAMLKTITGKVHLKTTENNND

SEQ ID NO: 1288 - protein, 100 aa, Artificial Sequence
  Description of Artificial Sequence:  Synthetic peptide
TAEIKPNKKILIELKVEKKPMGVIVCGGKNNHVTTGCVITHVYPEGQVAADKRLKIFDHICDINGTPIHVGSMTTLKVHQLFHTTYEKAVTLTVFRADPP

SEQ ID NO: 1289 - protein, 100 aa, Artificial Sequence
  Description of Artificial Sequence:  Synthetic peptide
IIEVVPGRKIVIEVKTDKKPLGVIVVGGKNNYVKTGCIITHIYPEGVIAEDKRLKIFDHIIQVNGKEVQCEAMTTLKVHQLFYTLYEKIVTIQVYRADPP

SEQ ID NO: 1290 - protein, 94 aa, Artificial Sequence
  Description of Artificial Sequence:  Synthetic peptide
LEDFELEVELLITLIKSEKGSLGFTVTKGNQRIGCYVHDVIQDPAKSDGRLKPGDRLIKVNDTDVTNMTHTDAVNLLRAASKTVRLVIGRVLEL

SEQ ID NO: 1291 - protein, 94 aa, Artificial Sequence
  Description of Artificial Sequence:  Synthetic peptide
LEDFELEVELLITLIKSEKASLGFTVTKGNQRIGCYVHDVIQDPAKSDGRLKPGDRLIKVNDTDVTNMTHTDAVNLLRAASKTVRLVIGRVLEL

SEQ ID NO: 1292 - protein, 94 aa, Artificial Sequence
  Description of Artificial Sequence:  Synthetic peptide
LEDFELEVELLITLHKSEKGSLGFTVTKGNQSIGCYVHDVIQDPAKSDGRLRPGDRLIKVNDTDVTNMTHTDAVNLLRRAPRTVRLVLGRVLEL

SEQ ID NO: 1293 - protein, 94 aa, Artificial Sequence
  Description of Artificial Sequence:  Synthetic peptide
LEDSELEVELLITLVKSEKGSLGFTVTKGSQSIGCYVHDVIQDPAKGDGRLKAGDRLIKVNDTDVTNMTHTDAVNLLRAAPKTVRLVLGRILEL

SEQ ID NO: 1294 - protein, 102 aa, Artificial Sequence
  Description of Artificial Sequence:  Synthetic peptide
KQGTAGELIHMVTLDKTGKKSFGICIVRGEVKDSPNTKTTGIFIKGIVPDSPAHLCGRLKVGDRILSLNGKDVRNSTEQAVIDLIKEADFKIELEIQTFDKS

SEQ ID NO: 1295 - protein, 100 aa, Artificial Sequence
  Description of Artificial Sequence:  Synthetic peptide
QLNASSGQVQSVTLDKTGKKSFGLSIVRGEARDGSNSKGIFIKGIVPDSPGHLCGKIKVGDRLLTLNGKDVRDATEPEVINLIKQAGSKIDLELQTYGSE

SEQ ID NO: 1296 - protein, 100 aa, Artificial Sequence
  Description of Artificial Sequence:  Synthetic peptide
IFPDDLGPPQSKTITLDRGPDGLGFSIVGGYGSPHGDLPIYVKTVFAKGAAAEDGRLKRGDQIIAVNGQSLEGVTHEEAVAILKRTKGTVTLMVLSLHDG

SEQ ID NO: 1297 - protein, 104 aa, Artificial Sequence
  Description of Artificial Sequence:  Synthetic peptide
LPPESPGPLRQRHVACLARSERGLGFSIAGGKGSTPYRAGDAGIFVSRIAEGGAAHRAGTLQVGDRVLSINGVDVTEARHDHAVSLLTAASPTIALLLEREAGG

SEQ ID NO: 1298 - protein, 102 aa, Artificial Sequence
  Description of Artificial Sequence:  Synthetic peptide
VMRRKPPAEKVMEIKLIKGPKGLGFSIAGGVGNQHIPGDNSIYVTKIIEGGAAHKDGRLQIGDKILAVNSVGLEDVMHEDAVAALKNTYDVVYLKVAKPSNA

SEQ ID NO: 1299 - protein, 102 aa, Artificial Sequence
  Description of Artificial Sequence:  Synthetic peptide
VMRRKPPAEKVMEIKLIKGPKGLGFSIAGALGTSIIPGDNSIYVTKIIEGGAGHKDGRLQIGDKILAVNSVGLEDVMHEDAVAALKNTYDVVYLKVAKPSNA

SEQ ID NO: 1300 - protein, 102 aa, Artificial Sequence
  Description of Artificial Sequence:  Synthetic peptide
VMRRKPPAEKIIEIKLIKGPKGLGFSIAGGVGNQHIPGDNSIYVTKIIEGGAAHKDGRLQIGDKILAVNSVGLEDVMHEDAVAALKNTYDVVYLKVAKPSNA

SEQ ID NO: 1301 - protein, 102 aa, Artificial Sequence
  Description of Artificial Sequence:  Synthetic peptide
VKRRKLASEKIMEIKLIKGPKGLGFSIAGGIGNQHIPGDNSIYVTKIIEGGAAHKDGKLQIGDKLLAVNSVCLEEVTHEEAVTALKNTSDFVYLKVAKPTSM

SEQ ID NO: 1302 - protein, 102 aa, Artificial Sequence
  Description of Artificial Sequence:  Synthetic peptide
VRRRQPPPETIMEVNLLKGPKGLGFSIAGGIGNQHIPGDNSIYITKIIEGGAAQKDGRLQIGDRLLAVNNTNLQDVRHEEAVASLKNTSDMVYLKVAKPGSL

SEQ ID NO: 1303 - protein, 102 aa, Artificial Sequence
  Description of Artificial Sequence:  Synthetic peptide
VRRRRPILETVVEIKLFKGPKGLGFSIAGGVGNQHIPGDNSIYVTKIIDGGAAQKDGRLQVGDRLLMVNNYSLEEVTHEEAVAILKNTSDVVYLKVGKPTTI

SEQ ID NO: 1304 - protein, 102 aa, Artificial Sequence
  Description of Artificial Sequence:  Synthetic peptide
ILRRRPILETVVEIKLFKGPKGLGFSIAGGVGNQHIPGDNSIYVTKIMDGGAAQKDGRLQVGDRLLMVNNYSLEEVTHEEAVAILKNTSDVVYLKVGKPTTI

SEQ ID NO: 1305 - protein, 102 aa, Artificial Sequence
  Description of Artificial Sequence:  Synthetic peptide
YVKRRKAFRKNHEIKLIKGPKGLGFSIAGGVGNQHIPGDNSIYVTKIIEGGAAHKDGKLQIGDKLLAVNSVCLEEVTHEEAVTALKNTSDFVYLKAAKPTSM

SEQ ID NO: 1306 - protein, 106 aa, Artificial Sequence
  Description of Artificial Sequence:  Synthetic peptide
ARDSAASGPKVIEIDLVKGGKGLGFSIAGGIGNQHIPGDNGIYVTKLTDGGRAQVDGRLSIGDKLIAVRTNGSEKNLENVTHELAVATLKSITDKVTLIIGKTQHL

SEQ ID NO: 1307 - protein, 102 aa, Artificial Sequence
  Description of Artificial Sequence:  Synthetic peptide
VGQYRSTRPNTSVIDLVKGARGLGFSIAGGQGNEHVKGDTDIYVTKIIEEGAAELDGRLRVGDKILEVDHHSLINTTHENAVNVLKNTGNRVRLLIQQGTGA

SEQ ID NO: 1308 - protein, 102 aa, Artificial Sequence
  Description of Artificial Sequence:  Synthetic peptide
YVNGTDADYEYEEITLERGNSGLGFSIAGGTDNPHIGDDSSIFITKIITGGAAAQDGRLRVNDCILQVNEVDVRDVTHSKAVEALKEAGSIVRLYVKRRKPV

SEQ ID NO: 1309 - protein, 102 aa, Artificial Sequence
  Description of Artificial Sequence:  Synthetic peptide
DSVNGDDSWLYEDIQLERGNSGLGFSIAGGTDNPHIGTDTSIYITKLISGGAAAADGRLSINDIIVSVNDVSVVDVPHASAVDALKKAGNVVKLHVKRKRGT

SEQ ID NO: 1310 - protein, 102 aa, Artificial Sequence
  Description of Artificial Sequence:  Synthetic peptide
VIDDHGRKWELENIVLEKGHTGLGFSITGGMDQPTEDGDTSIYVTNIIEGGAALADGRMRKNDIITAVNNTNCENVKHEVAVNALKSSGNVVSLSLKRRKDE

SEQ ID NO: 1311 - protein, 95 aa, Artificial Sequence
  Description of Artificial Sequence:  Synthetic peptide
TLPETVCWGHVEEVELINDGSGLGFGIVGGKTSGVVVRTIVPGGLADRDGRLQTGDHILKIGGTNVQGMTSEQVAQVLRNCGNSVRMLVARDPAG

SEQ ID NO: 1312 - protein, 95 aa, Artificial Sequence
  Description of Artificial Sequence:  Synthetic peptide
AHSNPTHWQHVETIELVNDGSGLGFGIIGGKATGVIVKTILPGGVADQHGRLCSGDHILKIGDTDLAGMSSEQVAQVLRQCGNRVKLMIARGAVE

SEQ ID NO: 1313 - protein, 102 aa, Artificial Sequence
  Description of Artificial Sequence:  Synthetic peptide
GQRSMDGYPEQFCVRIEKNPGLGFSISGGISGQGNPFKPSDKGIFVTRVQPDGPASNLLQPGDKILQANGHSFVHMEHEKAVLLLKSFQNTVDLVIQRELTV

SEQ ID NO: 1314 - protein, 107 aa, Artificial Sequence
  Description of Artificial Sequence:  Synthetic peptide
VTAVVQRVEIHKLRQGENLILGFSIGGGIDQDPSQNPFSEDKTDKGIYVTRVSEGGPAEIAGLQIGDKIMQVNGWDMTMVTHDQARKRLTKRSEEVVRLLVTRQSLQ

SEQ ID NO: 1315 - protein, 96 aa, Artificial Sequence
  Description of Artificial Sequence:  Synthetic peptide
GEAGASPPVRRVRVVKQEAGGLGISIKGGRENRMPILISKIFPGLAADQSRALRLGDAILSVNGTDLRQATHDQAVQALKRAGKEVLLEVKFIREV

SEQ ID NO: 1316 - protein, 96 aa, Artificial Sequence
  Description of Artificial Sequence:  Synthetic peptide
DAEPGNGCKPTVRIVKQEAGGLGISIKGGRENHMPILISKIFRGLAAEQSRLLFVGDAILSVNGTDLRDATHDQAVQALKKTGKEVVLEVKYLKEV

SEQ ID NO: 1317 - protein, 96 aa, Artificial Sequence
  Description of Artificial Sequence:  Synthetic peptide
VPESISNQKRGVKVLKQELGGLGISIKGGKENKMPILISKIFKGLAADQTQALYVGDAILSVNGADLRDATHDEAVQALKRAGKEVLLEVKYMREA

SEQ ID NO: 1318 - protein, 96 aa, Artificial Sequence
  Description of Artificial Sequence:  Synthetic peptide
LPEALLLQRRRVTVRKADAGGLGISIKGGRENKMPILISKIFKGLAADQTEALFVGDAILSVNGEDLSSATHDEAVQALKKTGKEVVLEVKYMKEV

SEQ ID NO: 1319 - protein, 96 aa, Artificial Sequence
  Description of Artificial Sequence:  Synthetic peptide
EQNEAEAEKRTVRVVKYDGNGLGISIKGGRDNNMPIVISKIFKGMAADQAGELFLDDVIISVNGENLLDASHEEAVRALKRAGRVVDLQVQYRRED

SEQ ID NO: 1320 - protein, 100 aa, Artificial Sequence
  Description of Artificial Sequence:  Synthetic peptide
EPARIEEEELTLTILRQTGGLGISIAGGKGSTPYKGDDEGIFISRVSEEGPAARAGVRVGDKLLEVNGVALQGAEHHEAVEALRGAGTAVQMRVWRERMV

SEQ ID NO: 1321 - protein, 105 aa, Artificial Sequence
  Description of Artificial Sequence:  Synthetic peptide
PNFSHWGPPRIVEIFREPNVSLGISIVGGQTVIKRLKNGEELKGIFIKQVLEDSPAGKTNALKTGDKILEVSGVDLQNASHSEAVEAIKNAGNPVVFIVQSLSST

SEQ ID NO: 1322 - protein, 105 aa, Artificial Sequence
  Description of Artificial Sequence:  Synthetic peptide
AAYSSWSQPRRVELWREPSKSLGISIVGGRGMGSRLSNGEVMRGIFIKHVLEDSPAGKNGTLKPGDRIVEVDGMDLRDASHEQAVEAIRKAGSPVVFMVQSIVNR

SEQ ID NO: 1323 - protein, 109 aa, Artificial Sequence
  Description of Artificial Sequence:  Synthetic peptide
VRSKYWGEARTVTLVREPNKSFGISIVGGRVEVSQKGGLPGTGNTVCGIFIKSVLPNSPAGRSGQMNMGDRVISVNDVDLRDATHEQAVNAIKNASNPVRFVLQSLHTN

SEQ ID NO: 1324 - protein, 99 aa, Artificial Sequence
  Description of Artificial Sequence:  Synthetic peptide
PQKCTEEEPRTVEIIRELSDALGISIAGGKGSPLGDIPIFIAMIQANGVAARTQKLKVGDRIVSINGQPLDGLSHTDAVNLLKNAFGRIILQVVADTNI

SEQ ID NO: 1325 - protein, 94 aa, Artificial Sequence
  Description of Artificial Sequence:  Synthetic peptide
KKSQGVGPIRKVLLLKEDHEGLGISITGGKEHGVPILISEIHPGQPADRCGGLHVGDAILAVNGVNLRDTKHKEAVTILSQQRGEIEFEVVYVA

SEQ ID NO: 1326 - protein, 96 aa, Artificial Sequence
  Description of Artificial Sequence:  Synthetic peptide
RKRNGVGKSRKVVLSKHPHEGLGISITGGSEHALPIVISEIQPGQPADRCGQVFVGDAILSVNGYDLRTVKHQEAVDILSGQVQQGDLDLELVFVC

SEQ ID NO: 1327 - protein, 105 aa, Artificial Sequence
  Description of Artificial Sequence:  Synthetic peptide
RRDPAPPGLRELCIQKAPGERLGISIRGGARGHAGNPRDPTDEGIFISKVSPTGAAGRDGRLRVGLRLLEVNQQSLLGLTHGEAVQLLRSVGDTLTVLVCDGFEA

SEQ ID NO: 1328 - protein, 99 aa, Artificial Sequence
  Description of Artificial Sequence:  Synthetic peptide
ALASEIQGLRTVEIKKGPADALGLSIAGGVGSPLGDVPIFIAMMHPNGVAAQTQKLRVGDRIVTICGTSTDGMTHTQAVNLMKNASGSIEVQVVAGGDV

SEQ ID NO: 1329 - protein, 102 aa, Artificial Sequence
  Description of Artificial Sequence:  Synthetic peptide
NLAAGTQNMHTIRIQKDDTGKLGLSFAGGTSNDPAPNSNGDSGLFVTKVTPGSAAYRCGLREGDKLIRANDVNMINASQDNAMEAIKKRETVELVVLRRSPS

SEQ ID NO: 1330 - protein, 98 aa, Artificial Sequence
  Description of Artificial Sequence:  Synthetic peptide
EEDKLGIPTVPGKVTLQKDAQNLIGISIGGGAQYCPCLYIVQVFDNTPAALDGTVAAGDEITGVNGKSIKGKTKVEVAKMIQEVKGEVTIHYNKLQAD

SEQ ID NO: 1331 - protein, 98 aa, Artificial Sequence
  Description of Artificial Sequence:  Synthetic peptide
EEDRLGMRIQSETIELTKDEKGVVGISIGGGGPYCPCVYVVQVFDKSPAFKDGRIRCGDEIVAINGITVKGERKSAVAQLIQVSLNPVKITINKLEEA

SEQ ID NO: 1332 - protein, 107 aa, Artificial Sequence
  Description of Artificial Sequence:  Synthetic peptide
ECLSIAVELHKQEVIDAHGQVTIRVGFKIGGGIDQDPTKAPFKYPDSGVYITNVESGSPADVAGLRKHDKILQVNGADFTMMTHDRAVKFIKQSKVLHMLVARADLP

SEQ ID NO: 1333 - protein, 97 aa, Artificial Sequence
  Description of Artificial Sequence:  Synthetic peptide
RSAEELRRAELVEIIVETEAQTGVSGFNVAGGGKEGIFVRELREDSPAAKSLSLQEGDQLLSARVFFENFKYEDALRLLQCAEPYKVSFCLKRTVPT

SEQ ID NO: 1334 - protein, 104 aa, Artificial Sequence
  Description of Artificial Sequence:  Synthetic peptide
KSSSPVGEDQVVTIKMRPDRHGRFGFNVKGGADQNYPVIVSRVAPGSSADKCQPRLNEGDQVLFIDGRDVSTMSHDHVVQFIRSARSGLNGGELHLTIRPNVYR

SEQ ID NO: 1335 - protein, 100 aa, Artificial Sequence
  Description of Artificial Sequence:  Synthetic peptide
QQMAQGRQIEYIDIERPSTGGLGFSVVALRSQNLGKVDIFVKDVQPGSVADRDQRLKENDQILAINHTPLDQNISHQQAIALLQQTTGSLRLIVAREPVH

SEQ ID NO: 1336 - protein, 100 aa, Artificial Sequence
  Description of Artificial Sequence:  Synthetic peptide
KSMAQGRHVEIFELLKPPCGGLGFSVVGLRSENRGELGIFVQEIQEGSVAHRDGRLKETDQILAINGQVLDQTITHQQAISILQKAKDTIQLVIARGSLP

SEQ ID NO: 1337 - protein, 94 aa, Artificial Sequence
  Description of Artificial Sequence:  Synthetic peptide
LTPRRSRKLKEVRLDRLHPEGLGLSVRGGLEFGCGLFISHLIKGGQADSVGLQVGDEIVRINGYSISSCTHEEVINLIRTKKTVSIKVRHIGLI

SEQ ID NO: 1338 - protein, 102 aa, Artificial Sequence
  Description of Artificial Sequence:  Synthetic peptide
MFTPEQIMGKDVRLLRIKKEGSLDLALEGGVDSPIGKVVVSAVYERGAAERHGGIVKGDEIMAINGKIVTDYTLAEADAALQKAWNQGGDWIDLVVAVCPPK

SEQ ID NO: 1339 - protein, 98 aa, Artificial Sequence
  Description of Artificial Sequence:  Synthetic peptide
RQSIPEEFKGSTVVELMKKEGTTLGLTVSGGIDKDGKPRVSNLRQGGIAARSDQLDVGDYIKAVNGINLAKFRHDEIISLLKNVGERVVLEVEYELPP

SEQ ID NO: 1340 - protein, 101 aa, Artificial Sequence
  Description of Artificial Sequence:  Synthetic peptide
LDEATLKQLDSIHVTILHKEEGAGLGFSLAGGADLENKVITVHRVFPNGLASQEGTIQKGNEVLSINGKSLKGTTHNDALAILRQAREPRQAVIVTRKLTP

SEQ ID NO: 1341 - protein, 101 aa, Artificial Sequence
  Description of Artificial Sequence:  Synthetic peptide
EAKAQSENEEDVCFIVLNRKEGSGLGFSVAGGTDVEPKSITVHRVFSQGAASQEGTMNRGDFLLSVNGASLAGLAHGNVLKVLHQAQLHKDALVVIKKGMD

SEQ ID NO: 1342 - protein, 90 aa, Artificial Sequence
  Description of Artificial Sequence:  Synthetic peptide
ASSQPAKPTKVTLVKSRKNEEYGLRPASHIFVKEISQDSLAARDGDIQEGDVVLKINGTVTENMSLTDAKTLIERSKGKLKMVVQRDERA

SEQ ID NO: 1343 - protein, 90 aa, Artificial Sequence
  Description of Artificial Sequence:  Synthetic peptide
ASSQPAKPTKVTLVKSRKNEEYGLRLASHIFVKEISQDSLAARDGNIQEGDVVLKINGTVTENMSLTDAKTLIERSKGKLKMVVQRDERA

SEQ ID NO: 1344 - protein, 90 aa, Artificial Sequence
  Description of Artificial Sequence:  Synthetic peptide
GQPDSDRPIGVLLMKSKANEEYGLRLGSQIFIKQMTRTALATKDGNLHEGDIILKINGTVTENMSLTDARKLIEKSRGKLQLVVLRDSKQ

SEQ ID NO: 1345 - protein, 90 aa, Artificial Sequence
  Description of Artificial Sequence:  Synthetic peptide
EPRGRPGPIGVLLMKSRANEEYGLRLGSQIFVKEMTRTGLATKDGNLHEGDIILKINGTVTENMSLTDARKLIEKSRGKLQLVVLRDSQQ

SEQ ID NO: 1346 - protein, 90 aa, Artificial Sequence
  Description of Artificial Sequence:  Synthetic peptide
RQDVHMRPVKSVLVRRTESEEFGVTLGSQIFIKHITDSGLAARNRGLQEGDLILQINGVSSENLSLSDTRRLIEKSEGKLTLLVLRDRGQ

SEQ ID NO: 1347 - protein, 94 aa, Artificial Sequence
  Description of Artificial Sequence:  Synthetic peptide
INGAELSRMREVAFEKNQSEPLGVTLKLNDKQRCSVARILHGGMIHRQGSLHEGDEIAEINGKSVANQTVDQLQKILKETNGVVTMKIIPRPQS

SEQ ID NO: 1348 - protein, 94 aa, Artificial Sequence
  Description of Artificial Sequence:  Synthetic peptide
VKGQEVRKVRLIQFEKVTEEPMGITLKLNEKQSCTVARILHGGMIHRQGSLHVGDEILEINGTNVTNHSVDQLQKAMKETKGMISLKVIPNQQS

SEQ ID NO: 1349 - protein, 97 aa, Artificial Sequence
  Description of Artificial Sequence:  Synthetic peptide
KRYNMMKDLRRIEVQRDASKPLGLALAGHKDRQKMACFVAGVDPNGALGSVDIKPGDEIVEVNGNVLKNRCHLNASAVFKNVDGDKLVMITSRRKPN

SEQ ID NO: 1350 - protein, 97 aa, Artificial Sequence
  Description of Artificial Sequence:  Synthetic peptide
KRYNTMRDLKKLEIVRPTNTALGLALAGHSDRQKMGCFVAGVNTSGPLASVDIKSGDEILEVNGTVLKNRCHLNASVIFKNIDGERLVLITSRRKPN

SEQ ID NO: 1351 - protein, 100 aa, Artificial Sequence
  Description of Artificial Sequence:  Synthetic peptide
IHFSKSENCKDVFIEKQKGEILGVVIVESGWGSILPTVIIANMMHGGPAEKSGKLNIGDQIMSINGTSLVGLPLSTCQSIIKGLKNQSRVKLNIVRCPPV

SEQ ID NO: 1352 - protein, 100 aa, Artificial Sequence
  Description of Artificial Sequence:  Synthetic peptide
IHFSNSENCKELQLEKHKGEILGVVVVESGWGSILPTVILANMMNGCPAARSGKLSIGDQIMSINGTSLVGLPLATCQGIIKGLKNQTQVKLNIVSCPPV

SEQ ID NO: 1353 - protein, 100 aa, Artificial Sequence
  Description of Artificial Sequence:  Synthetic peptide
DHFCNSQNCREVCIQKRPGEGLGVALVESGWGSLLPTAVIANLLHGGPAERCGALSIGDRVTAINGTSLVGLSLAACQAAVREVRRHSSVTLSIIHCPPV

SEQ ID NO: 1354 - protein, 100 aa, Artificial Sequence
  Description of Artificial Sequence:  Synthetic peptide
EMFAKKETQKEVVVPKKAGEPLGIVVVESGWGSMLPTVVLAHMNPVGPAAHSNKLNIGDQIININGISLVGLPLSAAQTQIKNMKTATAVRMTVVSTPPV

SEQ ID NO: 1355 - protein, 97 aa, Artificial Sequence
  Description of Artificial Sequence:  Synthetic peptide
DSVATASGPLLVEVAKTPGASLGVALTTSVCCNKQVIVIDKIKSASIADRCGALHVGDHILSIDGTSMEYCTLAEATQFLANTTDQVKLEILPHHQT

SEQ ID NO: 1356 - protein, 93 aa, Artificial Sequence
  Description of Artificial Sequence:  Synthetic peptide
HPERRELRPRLCAMKKGPNGYGFNLHSDKSRPGQFIRAVDPDSPAEASGLREQDRIVEVNGVCVEGKQHGDVVTAIKAGGDEAKLLVVDKETD

SEQ ID NO: 1357 - protein, 93 aa, Artificial Sequence
  Description of Artificial Sequence:  Synthetic peptide
KSHLRELRPRLCTMKKGPNGYGFNLHSDKSKPGQFIRAVDPDSPAEASGLRAQDRIVEVNGVCMEGKQHGDVVSAIKGGGDEAKLLVVDKETD

SEQ ID NO: 1358 - protein, 93 aa, Artificial Sequence
  Description of Artificial Sequence:  Synthetic peptide
HPEQRELRPRLCTMKKGPSGYGFNLHSDKSKPGQFIRSVDPDSPAEASGLRAQDRIVEVNGVCMEGKQHGDVVSAIRAGGDETKLLVVDRETD

SEQ ID NO: 1359 - protein, 93 aa, Artificial Sequence
  Description of Artificial Sequence:  Synthetic peptide
SGPLRELRPRLCHLRKGPQGYGFNLHSDKSRPGQYIRSVDPGSPAARSGLRAQDRLIEVNGQNVEGLRHAEVVASIKAREDEARLLVVDPETD

SEQ ID NO: 1360 - protein, 93 aa, Artificial Sequence
  Description of Artificial Sequence:  Synthetic peptide
DAAAGAPLPRLCCLEKGPNGYGFHLHGEKGKVGQYIRLVEPGSPAEKAGLLAGDRLVEVNGENVEKETHQQVVSRIRAALNAVRLLVVDPDTD

SEQ ID NO: 1361 - protein, 93 aa, Artificial Sequence
  Description of Artificial Sequence:  Synthetic peptide
DAAAGEPLPRLCCLEKGPNGYGFHLHGEKGKVGQFIRLVEPGSPAEKSGLLAGDRLVEVNGENVEKETHQQVVSRIRAALNAVRLLVVDPETD

SEQ ID NO: 1362 - protein, 93 aa, Artificial Sequence
  Description of Artificial Sequence:  Synthetic peptide
MAAPEPLRPRLCRLVRGEQGYGFHLHGEKGRRGQFIRRVEPGSPAEAAALRAGDRLVEVNGVNVEGETHHQVVQRIKAVEGQTRLLVVDQETD

SEQ ID NO: 1363 - protein, 94 aa, Artificial Sequence
  Description of Artificial Sequence:  Synthetic peptide
HIPSDVTPPRLCVVEKLNGENEYGYNLHAEKGRGQFVGTVDPDSPAERGGLITGDRIFAVNGHSIIGENHKKVVERIKANPNRCEMLVISEEGA

SEQ ID NO: 1364 - protein, 94 aa, Artificial Sequence
  Description of Artificial Sequence:  Synthetic peptide
PTDAMPYLPRLAELNKGTPDQEFGFNLHAERGRGHFIGTVDAGGIGEKAGLEAGQRIVGVNGQLIYPTTGHKEVVALIKKDTMKTTLLVASEDV

SEQ ID NO: 1365 - protein, 93 aa, Artificial Sequence
  Description of Artificial Sequence:  Synthetic peptide
TTEEVDHKPKLCRLAKGENGYGFHLNAIRGLPGSFIKEVQKGGPADLAGLEDEDVIIEVNGVNVLDEPYEKVVDRIQSSGKNVTLLVCGKKAY

SEQ ID NO: 1366 - protein, 92 aa, Artificial Sequence
  Description of Artificial Sequence:  Synthetic peptide
MASTFNPRECKLSKKEGQNYGFFLRIEKDTDGHLVRVIEEGSPAEKAGLLDGDRVLRIKRVFVDKEEHAQVVDLVRKSGNSVTLLVLDGDSY

SEQ ID NO: 1367 - protein, 100 aa, Artificial Sequence
  Description of Artificial Sequence:  Synthetic peptide
LPALGSLRPPIIIHRAGKKYGFTLRAIRVYMGDTDVYTVHHMVWHVEDGGPASEAGLRQGDLITHVNGEPVHGLVHTEVVELVLKSGNKVSISTTPLENT

SEQ ID NO: 1368 - protein, 100 aa, Artificial Sequence
  Description of Artificial Sequence:  Synthetic peptide
SPAVSGLRSPITIQRSGKKYGFTLRAIRVYMGDTDVYSVHHIVWHVEEGGPAQEAGLCAGDLITHVNGEPVHGMVHPEVVELILKSGNKVAVTTTPFENT

SEQ ID NO: 1369 - protein, 100 aa, Artificial Sequence
  Description of Artificial Sequence:  Synthetic peptide
SAASASPHQPIVIHSSGKNYGFTIRAIRVYVGDSDIYTVHHIVWNVEEGSPACQAGLKAGDLITHINGEPVHGLVHTEVIELLLKSGNKVSITTTPFENT

SEQ ID NO: 1370 - protein, 99 aa, Artificial Sequence
  Description of Artificial Sequence:  Synthetic peptide
PFTRFLEPSRLAALRRGTAGSVTGVGLEITYDGGSGKDVVVLTPAPGGPAEKAGARAGDVIVTVDGTAVKGLSLYDVSDLLQGEADSQVEVVLHAPGAP

SEQ ID NO: 1371 - protein, 102 aa, Artificial Sequence
  Description of Artificial Sequence:  Synthetic peptide
PFTRFLEPGKFKSLRSGTQGAVTGVGLSIGYPTASDGPPAGLVVISAAPGGPANRAGILPGDVIQGIDNTTTETLTIYDAAQMLQGPEGSAVELAIRSGPEG

SEQ ID NO: 1372 - protein, 98 aa, Artificial Sequence
  Description of Artificial Sequence:  Synthetic peptide
PYTRFLSSSDFSKMSKYDMTGIGLNIREIPDDNGSLRLVVLGLILDGPANSAGVRQGDELLSVNGSDVRGKSAFDVSSMLQGPKETFVTIKVKHGNCG

SEQ ID NO: 1373 - protein, 97 aa, Artificial Sequence
  Description of Artificial Sequence:  Synthetic peptide
IGRVILNKRTTMPKDSGALLGLKVVGGKMTDLGRLGAFITKVKKGSLADVVGHLRAGDEVLEWNGKPLPGATNEEVYNIILESKSEPQVEIIVSRPI

SEQ ID NO: 1374 - protein, 87 aa, Artificial Sequence
  Description of Artificial Sequence:  Synthetic peptide
SVPRDSGAMLGLKVVGGKMTESGRLCAFITKVKKGSLADTVGHLRPGDEVLEWNGRLLQGATFEEVYNIILESKPEPQVELVVSRPI

SEQ ID NO: 1375 - protein, 97 aa, Artificial Sequence
  Description of Artificial Sequence:  Synthetic peptide
KLIGHMILHRTENSAANGDLGLKIVGGRRTDTGKLGAFITQVKPGSVADTIGRLRPGDEVVEWNGQSLQNATYEQVYDSIAASRYDTSVELIVSRSA

SEQ ID NO: 1376 - protein, 92 aa, Artificial Sequence
  Description of Artificial Sequence:  Synthetic peptide
GSQRRYIGVMMLTLSPSILAELQLREPSFPDVQHGVLIHKVILGSPAHRAGLRPGDVILAIGEQMVQNAEDVYEAVRTQSQLAVQIRRGREV

SEQ ID NO: 1377 - protein, 92 aa, Artificial Sequence
  Description of Artificial Sequence:  Synthetic peptide
ETKRRYIGVMMLTLTPQHPAELKLRDPSFPDVSYGVLIHKVIIGSPAHQAGLKAGDVVLEINGQATRRAEDVYEAVRTQQSLALLVRRSYDT

SEQ ID NO: 1378 - protein, 98 aa, Artificial Sequence
  Description of Artificial Sequence:  Synthetic peptide
ARIKITRDSKDHTVSGNGLGIRIVGGKEIPGHSGEIGAYIAKILPGGSAEQTGKLMEGMQVLEWNGIPLTSKTYEEVQSIISQQSGEAEICVRLDLNM

SEQ ID NO: 1379 - protein, 95 aa, Artificial Sequence
  Description of Artificial Sequence:  Synthetic peptide
KRILLTRSYKHHNIYNDLGVRVVGGKRQMNGELSAYVSQLHSTANNQTLGQIKIGDEVVEWNGILLRGKTFEEVERIVNKSHGEIEMVIRTYKNP

SEQ ID NO: 1380 - protein, 95 aa, Artificial Sequence
  Description of Artificial Sequence:  Synthetic peptide
FIFDQFPKARTVQVRKEGFLGIMVIYGKHAEVGSGIFISDLREGSNAELAGVKVGDMLLAVNQDVTLESNYDDATGLLKRAEGVVTMILLTLKSE

SEQ ID NO: 1381 - protein, 95 aa, Artificial Sequence
  Description of Artificial Sequence:  Synthetic peptide
FLFEQYAKARSVQVKKEGFLGIMVIYGKHVEVGNGIFISDLREESNAMLAGLKVGDMLLAVNKDVCVESNYDEAVALLKRAEGIVNLVVLTLKTE

SEQ ID NO: 1382 - protein, 91 aa, Artificial Sequence
  Description of Artificial Sequence:  Synthetic peptide
EDGILRPSMKLVKFRKGDSVGLRLAGGNDVGIFVAGVLEDSPAAKEGLEEGDQILRVNNVDFTNIIREEAVLFLLDLPKGEEVTILAQKKK

SEQ ID NO: 1383 - protein, 91 aa, Artificial Sequence
  Description of Artificial Sequence:  Synthetic peptide
KMGFLRPSMKLVKFRKGDSVGLRLAGGNDVGIFVAGVLEDSPAAKEGLEEGDQILRVNNVDFTNIIREEAVLFLLDLPKGEEVTILAQKKK

SEQ ID NO: 1384 - protein, 91 aa, Artificial Sequence
  Description of Artificial Sequence:  Synthetic peptide
NEAIYGPNTKMVKFKKGDSVGLRLAGGNDVGIFVAGIQEGTSAEQEGLQEGDQILKVNTQDFRGLVREDAVLYLLEIPKGETVTILAQSRA

SEQ ID NO: 1385 - protein, 91 aa, Artificial Sequence
  Description of Artificial Sequence:  Synthetic peptide
DEAIYGPNTKMVRFKKGDSVGLRLAGGNDVGIFVAGIQEGTSAEQEGLQEGDQILKVNTQDFRGLVREDAVLYLLEIPKGEMVTILAQSRA

SEQ ID NO: 1386 - protein, 91 aa, Artificial Sequence
  Description of Artificial Sequence:  Synthetic peptide
EDRGYSPDSRVVRFHKGTTIGLRLAGGNDVGIFVSGVQEGSPADGQGIQEGDQILQVNDVPFRNLTREEAVQFLVALPPGEEVELVTQRNE

SEQ ID NO: 1387 - protein, 87 aa, Artificial Sequence
  Description of Artificial Sequence:  Synthetic peptide
MSNYSVSLVGPAPWGFRLQGGKDFNMPLTISSLKDGGKAAQANVRIGDVVLSIDGINAQGMTHLEAQNKIKGCTGSLNMTLQRASAA

SEQ ID NO: 1388 - protein, 87 aa, Artificial Sequence
  Description of Artificial Sequence:  Synthetic peptide
MSNYNVSLVGPAPWGFRLQGGKDFNMPLTISSLKDGGKASQAHVRIGDVVLSIDGISAQGMTHLEAQNKIKACTGSLNMTLQRASAA

SEQ ID NO: 1389 - protein, 86 aa, Artificial Sequence
  Description of Artificial Sequence:  Synthetic peptide
DSFKVVLEGPAPWGFRLQGGKDFNVPLSISRLTPGGKAAQAGVAVGDWVLSIDGENAGSLTHIEAQNKIRACGERLSLGLSRAQPV

SEQ ID NO: 1390 - protein, 86 aa, Artificial Sequence
  Description of Artificial Sequence:  Synthetic peptide
MPQNVVLPGPAPWGFRLSGGIDFNQPLVITRITPGSKAAAANLCPGDVILAIDGFGTESMTHADAQDRIKAASYQLCLKIDRAETR

SEQ ID NO: 1391 - protein, 86 aa, Artificial Sequence
  Description of Artificial Sequence:  Synthetic peptide
MPQNVVLPGPASWGFRLSGGIDFNQPLVITRITPGSKAEAANLCPGDMILAIDGFGTESMTHADAQDRIKAASYQLCLKIDRAETR

SEQ ID NO: 1392 - protein, 86 aa, Artificial Sequence
  Description of Artificial Sequence:  Synthetic peptide
MPQTVILPGPAPWGFRLSGGIDFNQPLVITRITPGSKAAAANLCPGDVILAIDGFGTESMTHADAQDRIKAAAHQLCLKIDRGETH

SEQ ID NO: 1393 - protein, 86 aa, Artificial Sequence
  Description of Artificial Sequence:  Synthetic peptide
MTHSVTLRGPSPWGFRLVGGRDFSLPLTISRVHAGSKAALAALCPGDLIQAINGESTELMTHLEAQNRIKGCHDHLTLSVSRPENK

SEQ ID NO: 1394 - protein, 85 aa, Artificial Sequence
  Description of Artificial Sequence:  Synthetic peptide
MPHSVTLRGPSPWGFRLVGRDFSAPLTISRVHAGSKASLAALCPGDLIQAINGESTELMTHLEAQNRIKGCHDHLTLSVSRPEGR

SEQ ID NO: 1395 - protein, 86 aa, Artificial Sequence
  Description of Artificial Sequence:  Synthetic peptide
MTHAVTLRGPSPWGFRLVGGRDFSAPLTISRVHAGSKAALAALCPGDSIQAINGESTELMTHLEAQNRIKGCHDHLTLSVSRPENK

SEQ ID NO: 1396 - protein, 87 aa, Artificial Sequence
  Description of Artificial Sequence:  Synthetic peptide
MTTQQIVLQGPGPWGFRLVGGKDFEQPLAISRVTPGSKAAIANLCIGDLITAIDGEDTSSMTHLEAQNKIKGCVDNMTLTVSRSEQK

SEQ ID NO: 1397 - protein, 87 aa, Artificial Sequence
  Description of Artificial Sequence:  Synthetic peptide
MTTQQIDLQGPGPWGFRLVGRKDFEQPLAISRVTPGSKAALANLCIGDVITAIDGENTSNMTHLEAQNRIKGCTDNLTLTVARSEHK

SEQ ID NO: 1398 - protein, 93 aa, Artificial Sequence
  Description of Artificial Sequence:  Synthetic peptide
TRAADGGRLVEVQLSGGAPWGFTLKGGREHGEPLVITKIEEGSKAAAVDKLLAGDEIVGINDIGLSGFRQEAICLVKGSHKTLKLVVKRRSEL

SEQ ID NO: 1399 - protein, 92 aa, Artificial Sequence
  Description of Artificial Sequence:  Synthetic peptide
AAKAKWRQVVLQKASRESPLQFSLNGGSEKGFGIFVEGVEPGSKAADSGLKRGDQIMEVNGQNFENITFMKAVEILRNNTHLALTVKTNMFK

SEQ ID NO: 1400 - protein, 92 aa, Artificial Sequence
  Description of Artificial Sequence:  Synthetic peptide
AAKAKRRLMTLTKPSREAPLPFILLGGSEKGFGIFVDSVDSGSKATEAGLKRGDQILEVNGQNFENIQLSKAMEILRNNTHLSITVKTNLFV

SEQ ID NO: 1401 - protein, 90 aa, Artificial Sequence
  Description of Artificial Sequence:  Synthetic peptide
NYFEHKHNIRPKPFIIPGRTSGCSTPSGIDCGSGRSTPSSVSTVSTICPGDLKVAAKMAPNIPLEMELPGVKIVHAQFNTPMQLYSDDNI

SEQ ID NO: 1402 - protein, 90 aa, Artificial Sequence
  Description of Artificial Sequence:  Synthetic peptide
NYFEHKHNIRPKPFVIPGRSSGCSTPSGIDCGSGRSTPSSVSTVSTICPGDLKVAAKLAPNIPLEMELPGVKIVHAQFNTPMQLYSDDNI

SEQ ID NO: 1403 - protein, 104 aa, Artificial Sequence
  Description of Artificial Sequence:  Synthetic peptide
SHLPHTVTLVSIPASAHGKRGLSVSIDPPHGPPGCGTEHSHTVRVQGVDPGCMSPDVKNSIHVGDRILEINGTPIRNVPLDEIDLLIQETSRLLQLTLEHDPHD

SEQ ID NO: 1404 - protein, 104 aa, Artificial Sequence
  Description of Artificial Sequence:  Synthetic peptide
SHLPHTVTLVSIPASSHGKRGLSVSIDPPHGPPGCGTEHSHTVRVQGVDPGCMSPDVKNSIHVGDRILEINGTPIRNVPLDEIDLLIQETSRLLQLTLEHDPHD

SEQ ID NO: 1405 - protein, 97 aa, Artificial Sequence
  Description of Artificial Sequence:  Synthetic peptide
SRSPHTVTLVSLPASDGKRGLSVSITPSCAEHSHTVRVTELDADFLGPDIQSSIHIGDRILEINGTPIRSVPLDEIDVLIQETSRLLQLTIEHDPHE

SEQ ID NO: 1406 - protein, 99 aa, Artificial Sequence
  Description of Artificial Sequence:  Synthetic peptide
TESSMGLEVITVRLNLETIPLGMTPSGHTNARGDAGLYVGDIQDRGAVALDGRIDIGDMIVGINEISLGNYSNKEAVQLLREAVQRQYLTLTIAKTGDP

SEQ ID NO: 1407 - protein, 95 aa, Artificial Sequence
  Description of Artificial Sequence:  Synthetic peptide
EQESSGAIIYTVELKRYGGPLGITISGTEEPFDPIIISSLTKGGLAERTGAIHIGDRILAINSSSLKGKPLSEAIHLLQMAGETVTLKIKKQTDA

SEQ ID NO: 1408 - protein, 99 aa, Artificial Sequence
  Description of Artificial Sequence:  Synthetic peptide
TLQSMSQEAFERTVTIAKGSSSLGMTVSANKDGLGVIVRSIIHGGAISRDGRIAVGDCILSINEESTISLTNAQARAMLRRHSLIGPDIKITYVPAEHL

SEQ ID NO: 1409 - protein, 113 aa, Artificial Sequence
  Description of Artificial Sequence:  Synthetic peptide
ALSPSGASRFEIVIPFINGSSSAGLGVSLKARVSKKSNGSKVDCGIFIKNVMHGGAAFKEGGLRVDDRIVGVEDIDLEPLDNREAQAALAKKLKEVGMISSNVRLTISRYNEC

SEQ ID NO: 1410 - protein, 94 aa, Artificial Sequence
  Description of Artificial Sequence:  Synthetic peptide
RIMGINYEIVVAHVSKFSENSGLGISLEATVGHHFIRSVLPEGPVGHSGKLFSGDELLEVNGINLLGENHQDVVNILKELPIDVTMVCCRRTVP

SEQ ID NO: 1411 - protein, 108 aa, Artificial Sequence
  Description of Artificial Sequence:  Synthetic peptide
SRIGDDIEIIAAVVKPDRQSVDGGLGISLEGTVDVLNGAQLCPHHYIESIRQDGPVAKTKVLQAGDELLQVNHSPLYGESHVTVRQALTRAVHSGAPVTLIVARRSQH

SEQ ID NO: 1412 - protein, 89 aa, Artificial Sequence
  Description of Artificial Sequence:  Synthetic peptide
YEERQSAEPRFISFQKEGSVGIRLTGGNEAGIFVTAVQPGSPASLQGLMPGDKILKVNDMDMNGVTREEAVLFLLSLQDRIDLIVQYCK

SEQ ID NO: 1413 - protein, 95 aa, Artificial Sequence
  Description of Artificial Sequence:  Synthetic peptide
KYDSDGGELVLVACERPDGGLGISLAGNKDRDKQNVFVVNVRPSCPLAIRPGDELLEINGRLLNKISHVAASAVVRECCDQHQNIEIVLRRRNGA

SEQ ID NO: 1414 - protein, 93 aa, Artificial Sequence
  Description of Artificial Sequence:  Synthetic peptide
DLSSLTNVYHLELPKDQGGLGIAICEEDTLNGVTIKSLTERGGAAKDGRLKPGDRILAVDDELVAGCPIEKFISLLKTAKTTVKLTVGAENPG

SEQ ID NO: 1415 - protein, 94 aa, Artificial Sequence
  Description of Artificial Sequence:  Synthetic peptide
EFLNEVEGKVGVQLRGVDIGGLGFNIQGNMNEGIFVKEIISKGIAEQCGNILVGDKIKSLTINFENMVYEDAVTLLSYSSPYKVKLELERKLSD

SEQ ID NO: 1416 - protein, 90 aa, Artificial Sequence
  Description of Artificial Sequence:  Synthetic peptide
SLGGKVVTPLHINLSGQKDSGISLENGVYAAAVLPGSPAAKEGSLAVGDRIVAINGIALDNKSLNECESLLRSCQDSLTLSLLKVFPQSS

SEQ ID NO: 1417 - protein, 95 aa, Artificial Sequence
  Description of Artificial Sequence:  Synthetic peptide
GVQQIQPNVISVRLFKRKVGGLGFLVKERVSKPPVIISDLIRGGAAEQSGLIQAGDIILAVNGRPLVDLSYDSALEVLRGIASETHVVLILRGPE

SEQ ID NO: 1418 - protein, 98 aa, Artificial Sequence
  Description of Artificial Sequence:  Synthetic peptide
FHLIPDGEITSIKINRADPSESLSIRLVGGSETPLVHIIIQHIYRDGVIARDGRLLPGDIILKVNGMDISNVPHNYAVRLLRQPCQVLRLTVLREQKF

SEQ ID NO: 1419 - protein, 89 aa, Artificial Sequence
  Description of Artificial Sequence:  Synthetic peptide
ASETTGLVQRCVIIQKDQHGFGFTVSGDRIVLVQSVRPGGAAMKAGVKEGDRIIKVNGTMVTNSSHLEVVKLIKSGAYVALTLLGSSPS

SEQ ID NO: 1420 - protein, 89 aa, Artificial Sequence
  Description of Artificial Sequence:  Synthetic peptide
LALPKNFQYLTLTVRKDSNGYGMKVSGDNPVFVESVKPGGAAEIAGLVAGDMILRVNGHEVRLEKHPTVVGLIKASTTVELAVKRSQKL

SEQ ID NO: 1421 - protein, 94 aa, Artificial Sequence
  Description of Artificial Sequence:  Synthetic peptide
SPGNRENKEKKVFISLVGSRGLGCSISSGPIQKPGIFISHVKPGSLSAEVGLEIGDQIVEVNGVDFSNLDHKEAVNVLKNSRSLTISIVAAAGR

SEQ ID NO: 1422 - protein, 93 aa, Artificial Sequence
  Description of Artificial Sequence:  Synthetic peptide
RRAEIKQGIREVILCKDQDGKIGLRLKSIDNGIFVQLVQANSPASLVGLRFGDQVLQINGENCAGWSSDKAHKVLKQAFGEKITMTIRDRPFE

SEQ ID NO: 1423 - protein, 92 aa, Artificial Sequence
  Description of Artificial Sequence:  Synthetic peptide
FETAAPPAPGSSDQEGQQWLRFLSEAGPEQKGQIIKDIEPGSPAEAAGLKNNDLVVAVNGESVEALDHDGVVEMIRNGGDQTTLLVLDKEAD

SEQ ID NO: 1424 - protein, 90 aa, Artificial Sequence
  Description of Artificial Sequence:  Synthetic peptide
REGYVYELATLVWVQNGPKLGLGIKHFQNRVLVSRVDPGSLAEKCLVLGDHLCDVDGIPVSDKDVARDLLVKNIQEKGKVTFVVERPDSI

SEQ ID NO: 1425 - protein, 93 aa, Artificial Sequence
  Description of Artificial Sequence:  Synthetic peptide
KKELAGPSSAEDYFVRKTNGRLGLTIYAHNDDGVIRAEVRGVTSFAPRCAQVGDSVVAVDSELISSVRNASDVEKLLRIGKVIHLRRKTPLTP

SEQ ID NO: 1426 - protein, 96 aa, Artificial Sequence
  Description of Artificial Sequence:  Synthetic peptide
SVNSGLPRILEIYLPMKNVPYLGLSVCTIDGHIFVSEIAPEGAVEKDGRVNVGDQILQVNRVSFEELSGPQAVRSLREAASSKRPITLYISKFARG

SEQ ID NO: 1427 - protein, 90 aa, Artificial Sequence
  Description of Artificial Sequence:  Synthetic peptide
DDAELQKYSKLLPIHTLRLGVEVDSFDGHHYISSIVSGGPVDTLGLLQPEDELLEVNGMQLYGKSRREAVSFLKEVPPPFTLVCCRRLFD

SEQ ID NO: 1428 - protein, 96 aa, Artificial Sequence
  Description of Artificial Sequence:  Synthetic peptide
PLILYACFIESALLRRRSDNINWGLNIQSSYRGVHVISEIKEGSPADACTKIDAGDEILMINGRTVVGWDLTSVVQQVGALDVLELSLIVKRRPRE

SEQ ID NO: 1429 - protein, 96 aa, Artificial Sequence
  Description of Artificial Sequence:  Synthetic peptide
ENEKQLGIEVNAVFDESSELPGTSEPTKLSSVQIMKIEDGGRIAKDGRIRVGDCIVAIDGKPVDQMSIIRVRASISDLAAVTSRPVTLIINRSLES

SEQ ID NO: 1430 - protein, 94 aa, Artificial Sequence
  Description of Artificial Sequence:  Synthetic peptide
GIVANVIFAYAIIFTQVVSVGLPVQESFPGVLVPDVKSFSAASRDGLLPGDVILAVDGTELSNSGSDSVSKVVDVVKRNPEHNVLLRIERGKES

SEQ ID NO: 1431 - protein, 186 aa, Artificial Sequence
  Description of Artificial Sequence:  Synthetic peptide
VGSLNCIVAVSQNMGIGKNGDLPWPPLRNEGRYFQRMTTTSSVEGKQNLVIMGKKTWFSIPEKNRPLKGRINLVLSRELKEPPQGAHFLSRSLDDALKLTEQPELANKVDMVWIVGGSSVYKEAMNHPGHLKLFVTRIMQDFESDTFFPEIDLEKYKLLPEYPGVLSDVQEEKGIKYKFEVYEKND

SEQ ID NO: 1432 - protein, 189 aa, Artificial Sequence
  Description of Artificial Sequence:  Synthetic peptide
VRSLNSIVAVCQNMGIGKDGNLPWPPLRNEYKYFQRMTSTSHVEGKQNAVIMGKKTWFSIPEKNRPLKDRINIVLSRELKEAPKGAHYLSKSLDDALALLDSPELKSKVDMVWIVGGTAVYKAAMEKPINHRLFVTRILHEFESDTFFPEIDYKDFKLLTEYPGVPADIQEEDGIQYKFEVYQKSVLAQ

SEQ ID NO: 1433 - protein, 186 aa, Artificial Sequence
  Description of Artificial Sequence:  Synthetic peptide
VRPLNCIVAVSQNMGIGKNGDRPWPPLRNEFKYFQRMTTTSSVEGKQNLVIMGRKTWFSIPEKNRPLKDRINIVLSRELKEPPRGAHFLAKSLDDALRLIEQPELASKVDMVWIVGGSSVYQEAMNQPGHLRLFVTRIMQEFESDTFFPEIDLGKYKLLPEYPGVLSEVQEEKGIKYKFEVYEKKD

SEQ ID NO: 1434 - protein, 205 aa, Artificial Sequence
  Description of Artificial Sequence:  Synthetic peptide
NQQKSLTLIVALTTSYGIGRSNSLPWKLKKEISYFKRVTSFVPTFDSFESMNVVLMGRKTWESIPLQFRPLKGRINVVITRNESLDLGNGIHSAKSLDHALELLYRTYGSESSVQINRIFVIGGAQLYKAAMDHPKLDRIMATIIYKDIHCDVFFPLKFRDKEWSSVWKKEKHSDLESWVGTKVPHGKINEDGFDYEFEMWTRDL

SEQ ID NO: 1435 - protein, 238 aa, Artificial Sequence
  Description of Artificial Sequence:  Synthetic peptide
MENLSDVFDIYAICACCKVAPTSEGTKNEPFSPRTFRGLGNKGTLPWKCNSVDMKYFRSVTTYVDESKYEKLKWKRERYLRMEASQGGGDNTSGGDNTHGGDNADKLQNVVVMGRSNWESIPKQYKPLPNRINVVLSKTLTKEDVKEKVFIIDSIDDLLLLLKKLKYYKCFIIGGAQVYRECLSRNLIKQIYFTRINGAYPCDVFFPEFDESEFRVTSVSEVYNSKGTTLDFLVYSKV

SEQ ID NO: 1436 - protein, 234 aa, Artificial Sequence
  Description of Artificial Sequence:  Synthetic peptide
MMEQVCDVFDIYAICACCKVESKNEGKKNEVFNNYTFRGLGNKGVLPWKCNSLDMKYFRAVTTYVNESKYEKLKYKRCKYLNKETVDNVNDMPNSKKLQNVVVMGRTNWESIPKKFKPLSNRINVILSRTLKKEDFDEDVYIINKVEDLIVLLGKLNYYKCFIIGGSVVYQEFLEKKLIKKIYFTRINSTYECDVFFPEINENEYQIISVSDVYTSNNTTLDFIIYKKTNNKML

SEQ ID NO: 1437 - protein, 192 aa, Artificial Sequence
  Description of Artificial Sequence:  Synthetic peptide
MLKPNVAIIVAALKPALGIGYKGKMPWRLRKEIRYFKDVTTRTTKPNTRNAVIMGRKTWESIPQKFRPLPDRLNIILSRSYENEIIDDNIIHASSIESSLNLVSDVERVFIIGGAEIYNELINNSLVSHLLITEIEHPSPESIEMDTFLKFPLESWTKQPKSELQKFVGDTVLEDDIKEGDFTYNYTLWTRK

SEQ ID NO: 1438 - protein, 183 aa, Artificial Sequence
  Description of Artificial Sequence:  Synthetic peptide
MSEKNVSIVVAASVLSSGIGINGQLPWSISEDLKFFSKITNNKCDSNKKNALIMGRKTWDSIGRRPLKNRIIVVISSSLPQDEADPNVVVFRNLEDSIENLMNDDSIENIFVCGGESIYRDALKDNFVDRIYLTRVALEDIEFDTYFPEIPETFLPVYMSQTFCTKNISYDFMIFEKQEKKTL

SEQ ID NO: 1439 - protein, 162 aa, Artificial Sequence
  Description of Artificial Sequence:  Synthetic peptide
TAFLWAQNRNGLIGKDGHLPWHLPDDLHYFRAQTVGKIMVVGRRTYESFPKRPLPERTNVVLTHQEDYQAQGAVVVHDVAAVFAYAKQHLDQELVIAGGAQIFTAFKDDVDTLLVTRLAGSFEGDTKMIPLNWDDFTKVSSRTVEDTNPALTHTYEVWQKKA

SEQ ID NO: 1440 - protein, 159 aa, Artificial Sequence
  Description of Artificial Sequence:  Synthetic peptide
MVGLIWAQATSGVIGRGGDIPWRLPEDQAHFREITMGHTIVMGRRTWDSLPAKVRPLPGRRNVVLSRQADFMASGAEVVGSLEEALTSPETWVIGGGQVYALALPYATRCEVTEVDIGLPREAGDALAPVLDETWRGETGEWRFSRSGLRYRLYSYHRS

SEQ ID NO: 1441 - protein, 159 aa, Artificial Sequence
  Description of Artificial Sequence:  Synthetic peptide
MISLIAALAVDRVIGMENAMPWNLPACLAWFKRNTLDKPVIMGRHTWESIGRPLPGRKNIILSSQPGTDDRVTWVKSVDEAIAACGDVPEIMVIGGGRVYEQFLPKAQKLYLTHIDAEVEGDTHFPDYEPDDWESVFSEFHDADAQNSHSYCFEILERR

SEQ ID NO: 1442 - protein, 168 aa, Artificial Sequence
  Description of Artificial Sequence:  Synthetic peptide
AKVIFVLAMDVSGKIASSVESWSSFEDRKNFRKITTEIGNVVMGRITFEEIGRPLPERLNVVLTRRPKTSNNPSLVFFNGSPADVVKFLEGKGYERVAVIGGKTVFTEFLREKLVDELFVTVEPYVFGKGIPFFDEFEGYFPLKLLEMRRLNERGTLFLKYSVEKSHR

SEQ ID NO: 1443 - protein, 162 aa, Artificial Sequence
  Description of Artificial Sequence:  Synthetic peptide
MELVSVAALAENRVIGRDGELPWPSIPADKKQYRSRIADDPVVLGRTTFESMRDDLPGSAQIVMSRSERSFSVDTAHRAASVEEAVDIAASLDAETAYVIGGAAIYALFQPHLDRMVLSRVPGEYEGDTYYPEWDAAEWELDAETDHEGFTLQEWVRSASSR

SEQ ID NO: 1444 - protein, 164 aa, Artificial Sequence
  Description of Artificial Sequence:  Synthetic peptide
MISHIVAMDENRVIGKDNRLPWHLPADLAYFKRVTMGHAIVMGRKTFEAIGRPLPGRDNVVVTGNRSFRPEGCLVLHSLEEVKQWIASRADEVFIIGGAELFRATMPIVDRLYVTKIFASFPGDTFYPPISDDEWEIVSYTPGGKDEKNPYEHAFIIYERKKAK

SEQ ID NO: 1445 - protein, 193 aa, Artificial Sequence
  Description of Artificial Sequence:  Synthetic peptide
MIKLVFRYSPTKTVDGFNELAFGLGDGLPWGRVKKDLQNFKARTEGTIMIMGAKTFQSLPTLLPGRSHIVVCDLARDYPVTKDGDLAHFYITWEQYITYISGGEIQVSSPNAPFETMLDQNSKVSVIGGPALLYAALPYADEVVVSRIVKRHRVNSTVQLDASFLDDISKREMVETHWYKIDEVTTLTESVYK

SEQ ID NO: 1446 - protein, 169 aa, Artificial Sequence
  Description of Artificial Sequence:  Synthetic peptide
MAKVIFVLAMDVSGKIASSVESWSSFEDRKNFRKITTEIGNVVMGRITFEEIGRPLPERLNVVLTRRPKTSNNPSLVFFNGSPADVVKFLEGKGYERVAVIGGKTVFTEFLREKLVDELFVTVEPYVFGKGIPFFDEFEGYFPLKLLEMRRLNERGTLFLKYSVEKSHR

SEQ ID NO: 1447 - protein, 193 aa, Artificial Sequence
  Description of Artificial Sequence:  Synthetic peptide
MIKLVFAYSPTKTVEGFNELAFGLCDGLPWGRVKKDLQNFKARTEGTIMIMGAKTFQSLSTLLPGRSHIVVCDLERDYPETKDGDLAHFYITWEQYITYISGGSIQVSSPNAPFEAMLDQNSNVSVIGGPALLYAALPCADEVVVSRIVKRHRVNSTVQLDASFLDDISKREMVETHWYKIDEVTTLTESVYK

SEQ ID NO: 1448 - protein, 191 aa, Artificial Sequence
  Description of Artificial Sequence:  Synthetic peptide
MGPQPWCTLNCIVAVSQNLGIGRNGDLPWPPLRNEFKCFQRMTTNSSVEGKQNLVIMGRKTWFSIPEKNRPLKDRINIVLSRDLKEPPQGAHFLAKSLDDALKLTEQPELANKVDMVWIVGGSSVYKEAMNKPGHLRLFVTRIMHEFEGDTFFPEIDLEKYKLLPEYPGVLSDVQEEKGIKYKFEVYEKND

SEQ ID NO: 1449 - protein, 168 aa, Artificial Sequence
  Description of Artificial Sequence:  Synthetic peptide
MVRSLNSIVAVCQNMGIGKDGNLPWPPLRNEYKYFQRMTSTSHVEGKQNAVIMGKKTWFSIPEKNRPLKDRINIVLSRELKEAPKGAHYLSKSLDDALALLDSPELKSKVDMVWIVGGTAVYKAAMEKPINHRLFVTRILHEFESDTFFPEIDYKDFKLLTEYPGVPA

SEQ ID NO: 1450 - protein, 187 aa, Artificial Sequence
  Description of Artificial Sequence:  Synthetic peptide
MVQALNCIVAVAQNMGIGKQGNLPWPRLMNDFKHFQRMTTTSSVPDKQNLVIMGKKTWFSIPEKNRPLKGRINVVLSKELKELPHRAHFLAKSLDDALKLTEQPELANKVDMVWIIGGSSVYKEAMSYPCDLKLFVTRIMQDFECDTFFPEFDLEKYKLLIEYPSVLSNVQEEKSIKYKFEVYEKNH

SEQ ID NO: 1451 - protein, 190 aa, Artificial Sequence
  Description of Artificial Sequence:  Synthetic peptide
MVQLLNCIVAVAQNMGIGNKSKLPWPTLINDLKYFQRMTTSSAKNKQNLVIMGKRTWFSIPEKNRPLKNRINVVLSKELKELPHKAHFLARSLDDALKLIEQPEVANKVDMVWIIGGSSVYKEVMDYPCYLKLFVTRIMQDFESDTFFPEFDLEKYKLLVEYPGVPSNIQEEKGIKYKFEVYEKNVLVTV

SEQ ID NO: 1452 - protein, 160 aa, Artificial Sequence
  Description of Artificial Sequence:  Synthetic peptide
MIISLIAALAADRVIGMENAMPWHLPADLAWFKRNTLNKPVIMGRKTFESIGRPLPGRLNIVISSQPGVDDRVTWANSIDEALALAGDVEEVMVMGGGRVYKQFLDRANRMYLTHIDAEVGGDTHFPDYEPDEWESTFSEFHDADEVNSHSYCFEILERR

SEQ ID NO: 1453 - protein, 161 aa, Artificial Sequence
  Description of Artificial Sequence:  Synthetic peptide
MNISLIAALAMDRVIGMENKMPWNLPGDLAWFKRNTLNKPVIMGRVTYESIGHPLPGRLNIVLSNQPGNDERVTWVSSVDEALAVAGDAEEVMVMGGGKVYDQFISRASRMYLTHIDAEVIGDTHFPDYEPDEWDSEFTEYHDADELNSHSYCFEILQRRL

SEQ ID NO: 1454 - protein, 160 aa, Artificial Sequence
  Description of Artificial Sequence:  Synthetic peptide
MVISLIAALAVDRVIGMENAMPWHLPADLAWFKRNTLNKPIIMGRNTFRSIGQPLPGRLNIVVSNHPGDDERVTWVSSLDAALAAAGEVEEVMVIGGGSVYQQMLSQANRLYLTHIDAEVEGDTHFPDYEPDEWQSVFSEFHDADERNSHSYCFEILERR

SEQ ID NO: 1455 - protein, 190 aa, Artificial Sequence
  Description of Artificial Sequence:  Synthetic peptide
MVLLLNCIVAVDQNMGIGKKGHLPWPLLINDFKYFQRMTTSSVKNKQNLVIMGKNTWFSIPEKNRPLKDRINLVLSKKLKEIPHGAHFLARSLNDALKLIEQPELVNKVDRVWIIGGSSVYKDAMNYSSHLKLFVTRIMQSFETDTFFPEIDLKNYKLLIEYPGVPSNTQEEKGIKYKFEVYEKIVNTFL

SEQ ID NO: 1456 - protein, 161 aa, Artificial Sequence
  Description of Artificial Sequence:  Synthetic peptide
MIISLIAALAVDRVIGMENTMPWHLSADLAWFKRNTLNKPVIMGRRTFESIGKPLPGRQNIVLSSHPGDNDAVTWVTTPAQALAAAGEVVEVMVIGGGKVYETFLPQAGRLYLTHIDAEVDGDTWFPDYEPDEWRSTFSAFHDADEKNTHSYCFEILDRRV

SEQ ID NO: 1457 - protein, 194 aa, Artificial Sequence
  Description of Artificial Sequence:  Synthetic peptide
MIKLVFAYSPTETVDGTKQNAFGLGDGLPWGRVKKDLQNFKARTEGTIMIMGAKTFQSLPTLLPGRSHVVVCDIKRGYPETKDGDLAHFYITWDEYVTLVAGGRIQLSSPNTNFETFIDASENRISVIGGPALLYAALPYADEVVVSRIEKCHRVNSTVQLEENFLHEIRQREMLETHWYKIDELTTLTETVYK

SEQ ID NO: 1458 - protein, 156 aa, Artificial Sequence
  Description of Artificial Sequence:  Synthetic peptide
MTVVVGYLVKTSETGKQNLVIMGRKTWFSIPEKNRPLKDRINIVLSRDLKEPPQGAHFLAKSLDDALKLTEQPELANKVDMVWIVGGSSVYKEAMNKPGHLRLFVTRIMHEFESDTFFPEIDLEKYKLLPEYPGVLSDVQEEKGIKYKFEVYEKND

SEQ ID NO: 1459 - protein, 187 aa, Artificial Sequence
  Description of Artificial Sequence:  Synthetic peptide
MVRPLNCIVAVSQNMGIGKNGNLPWPPLRNEFQYFQRMTTVSSVEGKQNLVIMGRKTWFSIPEKNRPLKDRINIVLSRELKEPPKGAHFLAKSLDDALELIEDPELTNKVDVVWIVGGSSVYKMKSNTGVSGQQVALQVVIKGARFIPPCGVCLRLGISRTVAKKEKARRITCGRSGREGSPGTGYT

SEQ ID NO: 1460 - protein, 235 aa, Artificial Sequence
  Description of Artificial Sequence:  Synthetic peptide
MNEISDIFDIHAICACCKVENKNEKKKNEIFSNNTFRGIGNKGVLPWKSNPLDMKYFTTVTTYVNESKYKKLKYKREKYLEKTKDTKCLESIIQLSNNLQNVVVMGRTSWESIPERFRPLVNRINVVLSRSLKKEDIKGDAILINNVDDLLLLLRKINYYKCFIIGGSVVYNEFLKRNLIKKIYFTRINSTYECDVFFPEIKETEFEIMSLSDVYSNNGATLDFVIYKRKKEILN

SEQ ID NO: 1461 - protein, 189 aa, Artificial Sequence
  Description of Artificial Sequence:  Synthetic peptide
MRNQFLHAVVAVCPPNQGIGKGGSLPWPLLRNEFKHFQRLTMTPTVEGKKNVVIMGRKTWFSIPEKNRPLKERINIVLSKELKEPPTGAHYLSKSLTEAIDLLEDPELKDKVDLVWIIGGSSLYQELMEKPINQRWFVTRILQEFECDTYLPEINLNSFQLLPQYPGISPELQEENGVQYKFEVYEKIV

SEQ ID NO: 1462 - protein, 160 aa, Artificial Sequence
  Description of Artificial Sequence:  Synthetic peptide
MIISMIAAMADNRVIGKDNQMPWHLPADFAWFKRCTMGKPVVMGRKTYDSIGRPLPGRLNIVISRDESLSIEGVTTVTSVEKALEAAGDVEEVMIIGGGAIYASCLAMANKLYVTHIDAVVEGDTQFPDWGNEFKETYSETYQADEKNAYNMRFTILEKQ

SEQ ID NO: 1463 - protein, 162 aa, Artificial Sequence
  Description of Artificial Sequence:  Synthetic peptide
MISMIAAMAHDRVIGLDNQMPWHLPADLAHFKRVTLGKPVLMGRKTFESIGRPLPGRRNLVISRNPDYRADGVEVIDSVEAALALLAGSDVAELMVIGGGHLYGQLLPRADRLYLTRIDLAVEGDTRFPAFDEGDWSCIERESHQPDEKNPHSYCFETWQRR

SEQ ID NO: 1464 - protein, 162 aa, Artificial Sequence
  Description of Artificial Sequence:  Synthetic peptide
MLISLIAALAHNNLIGKDNLIPWHLPADLRHFKAVTLGKPVVMGRRTFESIGRPLPGRRNVVVSRNPQWQAEGVEVAPSLDAALALLTDCEEAMIIGGGQLYAEALPRADRLYLTYIDAQLNGDTHFPDYLSLGWQELERSTHPADDKNSYACEFVTLSRQR

SEQ ID NO: 1465 - protein, 162 aa, Artificial Sequence
  Description of Artificial Sequence:  Synthetic peptide
MIISMIAAMAKQRIIGKDNQMPWHLPADFAWFKRCTMGKPIVMGRKTYDSIGRPLPGRLNIVISRDESLVIEGVTMANSIAHALALAGDADEVMIIGGGSIYAECLPKADKLYLTFIDATIDGDTQFPDWGEQWCESHREHYSADEKNRYAMDFVILERVNC

SEQ ID NO: 1466 - protein, 159 aa, Artificial Sequence
  Description of Artificial Sequence:  Synthetic peptide
MIAAMANNRVIGLDNKMPWHLPADLQHFKAVTTGKPVIMGRKTFESIGRPLPGRRNIIITRNTEYKAEGIETVTSPEAALSLVCGVEEVMIIGGGNVYQQFLTQAERLYLTFIDLDVEGDTQFPDYQAIANWEVKEEQVKQPDEKNKHSYKFVTLYKYC

SEQ ID NO: 1467 - protein, 185 aa, Artificial Sequence
  Description of Artificial Sequence:  Synthetic peptide
MARVLNAIVAVCPDLGIGRNGDLPWHPIRLDNEFKHFRKMTSTPSVNGKQNVVIMGRKTWFSIPEKHRPLANRINIVLSRRSRASSRSPPSGPRPELRSAAGGDAAGGQADQVWVIGGSSLYQEMMERPGTSRLFVTHVLKQFDCDTFLPEIRPQRYRLLPQFPGVPQELQEEKGIQYRYQVYES

SEQ ID NO: 1468 - protein, 155 aa, Artificial Sequence
  Description of Artificial Sequence:  Synthetic peptide
MIAAMAKNRIIGIDNQMPWHLPADFAWFKKCTMGKPIVMGRKTYESIGRPLPGRLNIVLSRDANLQIDGVTCVTSIEEAKQAAGDIEELMIIGGGSIYQACLSDADKLYLTFIDADINGDTQFPDWGEGWNQTHSETYSKDEKNQYDMEFVVLER

SEQ ID NO: 1469 - protein, 160 aa, Artificial Sequence
  Description of Artificial Sequence:  Synthetic peptide
MRIAMIAAMANNRVIGKDNQMPWHLPEDLKHFKAMTLGKPVVMGRKTFESIGRPLPGRHNIVISRQSDYSHEGISLVSSFEEAVALAGDCEELVVIGGGQLYQTLISQADKLYLTEIALEVEGDTHFPAWDDGSWETVESTEHVSDKGLQYRFITLVKKC

SEQ ID NO: 1470 - protein, 165 aa, Artificial Sequence
  Description of Artificial Sequence:  Synthetic peptide
MMISMIAAMADQRIIGKDNQMPWHLPADFAWFKRCTLGKPVVMGRKTYQSIGRPLPGRHNIVISRDASLQIEGVDVVTSIEAALAKAGEVDEVMIIGGGSLYAACLPMAHKLYITEIHAKLDGDTQFPEWGSDWLERSREHYPADEKNAYGMDFVIFERQYPLPT

SEQ ID NO: 1471 - protein, 160 aa, Artificial Sequence
  Description of Artificial Sequence:  Synthetic peptide
MKIAMIAAMANNRVIGKDNQMPWHLPEDLRHFKQMTLGKPVVMGRKTFESIGRPLPGRHNLVVSRQEDLVIEGVTCVTSFEQAKELVQGCDELVVIGGGQLYAELLPQADRLYLTEINLDVEGDTHFPDWDDGSWQLLDSESHINDKGLEYRFINLAKKC

SEQ ID NO: 1472 - protein, 159 aa, Artificial Sequence
  Description of Artificial Sequence:  Synthetic peptide
MIISMIAAMANNRVIGKDNQMPWHLPADFAWFKRSTMGKPVVMGRKTYDSIGRPLPGRLNVVISRDESLEIEGVTTVTSIEKALELVSDVDEVMIIGGGSIYESCLPKANKLYLTYIDFDVDGDTQFPDWGEGWKQSFNDTYQADEKNKHNMEFVVLER

SEQ ID NO: 1473 - protein, 160 aa, Artificial Sequence
  Description of Artificial Sequence:  Synthetic peptide
MRIAMIAAMANNRVIGKDNKMPWHLPEDLRHFKAMTLGKPVVMGRKTFESIGRPLPGRHNIVISRQADLQIEGVTCVTSFEAAKRVAGDCEELVVIGGGQLYKQLLPQADRLYLTQINLDVDGDTFFPAWEDNEWQKTETQPSISADGLEYNFINLVKKC

SEQ ID NO: 1474 - protein, 160 aa, Artificial Sequence
  Description of Artificial Sequence:  Synthetic peptide
MRIAMIAAMANNRVIGKDNKMPWHLPEDLRHFKAMTLGKPVVMGRKTFESIGRPLPGRHNIVISRQADLLIEGVTCVTSFEAAKEAAGDCEELVVIGGGQLYQQLLPQADRLYLTQINLDVEGDTFFPAWKNDEWQETESVAAINADGLEYRFINLAKKC

SEQ ID NO: 1475 - protein, 160 aa, Artificial Sequence
  Description of Artificial Sequence:  Synthetic peptide
MRIAMIAAMANNRVIGKENKMPWHLPEDLRHFKGMTLGKPVLMGRKTFESIGRPLPGRHNIVISRQTDLVIEGVTCVTSFDAAKQAAGECEELVVIGGGQLYAELLPYADTLYLTQIKLEVEGDTFFPHWDDGTWKETESLSSINADGLEYRFINLVKKC

SEQ ID NO: 1476 - protein, 160 aa, Artificial Sequence
  Description of Artificial Sequence:  Synthetic peptide
MRIAMIAAMANNRVIGKDNQMPWHLPEDLRHFKAMTLGKPVVMGRKTFESIGRPLPGRHNIVITRQLDYAIEGVSCVSSFDEAKKIAGDCDELIVMGGGQLYAEILPFAEVMYLTLIKLDVEGDTFFPAWNEQEWQVSQTESVTNHDGLEYSFNTLVKKC

SEQ ID NO: 1477 - protein, 160 aa, Artificial Sequence
  Description of Artificial Sequence:  Synthetic peptide
MRIAMIAAMANNRVIGKDNKMPWHLPEDLRHFKAMTLSKPVVMGRKTYESIGRPLPGRHNIVISRNSQLSIEGVTCVKSFDEAITVAGDCEEIVVIGGGQLYQQLLPQADVLYLTLIDVDVDGDTVFPAWDDGSWDLQNSVTATNDKGLQYSFNTLVKKC

SEQ ID NO: 1478 - protein, 170 aa, Artificial Sequence
  Description of Artificial Sequence:  Synthetic peptide
MTILSMIVATADNNIIGKDNDMPWHLPADLAYFKKVTLGKPIIMGRKTFESIGRPLPGRRNIVISRDEHYQAEGIDSVTSVEQALALVDGSDGIEGAEEIMVIGGGAIYAHCLPKADRLYITHIKAAIDGDTKFPNYEDGSWEKVSSELRESDEKNIHQLDFCVYERIAS

SEQ ID NO: 1479 - protein, 155 aa, Artificial Sequence
  Description of Artificial Sequence:  Synthetic peptide
MANNRVIGLNNTMPWHLPGDLQHFKKVTTGKPVIMGRKTFESIGRPLPGRRNIIITRNSQYQATGIEIVTTPEAALNLVTDVEEVMIIGGGNIYQQFLESAQRLYLTFIDLDVEGDTQFPDYEKVATWQVKDEIQMAADEKNQYSHKFVTLYKNP

SEQ ID NO: 1480 - protein, 160 aa, Artificial Sequence
  Description of Artificial Sequence:  Synthetic peptide
MRIAMIAAMANNRVIGKDNKMPWYLPEDLKHFKAMTLGKPVVMGRKTFESIGRPLPGRHNIVISRQADLVIEGVTCVTSFDAAKQAAGECEELVIMGGGQLYRELLPQADILYLTQINLDVEGDTYFPEWDARDWQETESLSCINADGLEYRFINLTKKC

SEQ ID NO: 1481 - protein, 235 aa, Artificial Sequence
  Description of Artificial Sequence:  Synthetic peptide
MEDISEIFDIYAICACCKVLNSNEKAGCFSNKTFKGLGNEGGLPWKCNSVDMKHFSSVTSYVNETNYMRLKWKRDRYMEKNNVKLNTDGIPSVDKLQNIVVMGKASWESIPSKFKPLQNRINIILSRTLKKEDLAKEYNNVIIINSVDDLFPILKCIKYYKCFIIGGASVYKEFLDRNLIKKIYFTRINNAYTCDVLFPDINEDLFKITSISDVYSSNNTTLDFVIYSKTKEIHE

SEQ ID NO: 1482 - protein, 243 aa, Artificial Sequence
  Description of Artificial Sequence:  Synthetic peptide
MEDLSETFDIYAICACCKVLNDDEKVRCFNNKTFKGIGNAGVLPWKCNLIDMKYFSSVTSYINENNYIRLKWKRDKYMEKHNLKNNVELNTNIISSTNNLQNIVVMGKKSWESIPKKFKPLQNRINIILSRTLKKEDIVNENNNENNNVIIIKSVDDLFPILKCTKYYKCFIIGGSSVYKEFLDRNLIKKIYFTRINNSYNCDVLFPEINENLFKITSISDVYYSNNTTLDFIIYSKTKEINP

SEQ ID NO: 1483 - protein, 166 aa, Artificial Sequence
  Description of Artificial Sequence:  Synthetic peptide
MKISLVVAMADNRVIGKDNKMPWHLPDELQYFKKITLGKPIVMGRRTFESIGRPLPGRKNIVLSRRTDRSENQDSQVVWVSGVQQAIAAAGPVEELMIIGGGKIYEKFLPLADRLYVTKIELNVEGDTYFPDYHQVADWQEIERQNFAADERNSHNFSTLIFDRVS

SEQ ID NO: 1484 - protein, 243 aa, Artificial Sequence
  Description of Artificial Sequence:  Synthetic peptide
MEDLSEIFDIYAICACCKVINNNEKSGSFNNKTFNGLGNAGMLPWKYNLVDMNYFSSVTSYVNENNYIRLQWKRDKYMGKNNLKNNAELNNGELNNNLQNVVVMGKRSWDSIPPKFKPLQNRINIILSRTLKKEDIANEDNKNNENGTVMIIKSVDDLFPILKAIKYYKCFIIGGSYVYKEFLDRNLIKKIYFTRINNSYNCDVLFPEINENLFKISSISDVYNSNNTTLDFIIYSKKTEKIN

SEQ ID NO: 1485 - protein, 166 aa, Artificial Sequence
  Description of Artificial Sequence:  Synthetic peptide
MKVSMIAAMANNRVIGKDNAMPWHIPNELQYFKKVTLGKPIVMGRRTFESLGRPLPGRKNIVLTSQPDRHQDPDNGVIWVANVDQAFAAAGDAEELMIIGGGKIYELFFPYCDRLYVTEIELDVEGDTYFPDYQKAHSWQELKRQFVAASDDQVPAYTIKVLDKES

SEQ ID NO: 1486 - protein, 162 aa, Artificial Sequence
  Description of Artificial Sequence:  Synthetic peptide
MRIAMIAAMANNRVIGKDNQMPWHLPADLKHFKKVTLGKPVIMGRKTYQSIGKALPGRRNIVISRQGVALSADADWVRSIEQALALVQDEAEVMIIGGAEIYRQVLPLADTLYITDIELTVEGDAFFPDYQAAARWHEAASESHQADPQNPHSYHFRILNRE

SEQ ID NO: 1487 - protein, 195 aa, Artificial Sequence
  Description of Artificial Sequence:  Synthetic peptide
MLKLVFACAPSKTVDDKLEYAFGLGDGLPWKHIKQDMSNFVARTKNTVMVMGAKTFASLPRLLPDRTHMVVTDMARKLPRTKTDELARFYITQAEFITLVMGGEINLFSPSTDVPFKLSTEHVDVSVIGGPALLKQALPYADEIVMTKIIKKCRVNSDVQLDKDFVQDIMLQRSMVESHYYRIDELTEITESVYK

SEQ ID NO: 1488 - protein, 171 aa, Artificial Sequence
  Description of Artificial Sequence:  Synthetic peptide
MNQTRLPLAMIAALAQNRVIGLDNRMPWHLPADLKHFKAMTLGKPIIMGRKTWDSLGRPLPGRLNLVVSRQADLQIDGAETFTDLDAALVRAEQWAREQGAAELMLIGGAQLYAQALSQAQRLYLTRIDAAPEGDAFFPAFDEAEWQCIDSQPHPAEGEAPAYRFETWQRR

SEQ ID NO: 1489 - protein, 171 aa, Artificial Sequence
  Description of Artificial Sequence:  Synthetic peptide
MNTSLPLSLIAAYAENRVIGIDNSMPWHLPGDFKYFKATTLGKPIIMGRKTWDSLGRPLPGRLNIVVSRQPGLELAGAEVFASLEEALVRAEQWAREQGVGELMLIGGAQLYGQALEKGLVSRMYLTRVELAPEGDAWFPAFDEGQWRLTSSEAQAEEGKPAYHFEVWDKG

SEQ ID NO: 1490 - protein, 170 aa, Artificial Sequence
  Description of Artificial Sequence:  Synthetic peptide
MKTHLPLSLIAALGENRVIGVDNSMPWHLPGDFKYFKATTLGKPIIMGRKTWDSLGRPLPGRLNLVVSRQTDLQLEGAEVFPSLDAAVVRAEQWAQEQGVDEVMLIGGAQLYAQGLAQADRLYLTRVALSPEGDAWFPEFDTAQWALVSNAENAAVDEKPAYSFEVWERV

SEQ ID NO: 1491 - protein, 168 aa, Artificial Sequence
  Description of Artificial Sequence:  Synthetic peptide
MARPLAMIAALGENRAIGIDNRLPWRLPADLKHFKAMTLGKPVIMGRKTWDSLGRPLPGRLNLVVSRQAGLALEGAEVFASLDAALARAEAWAQAEDADELMLIGGAQLYAEALPRAARLYLTRVGLAPEGDAFFPEIDGAAWRLASSIEHAAADDAPAYAFEVWERR

SEQ ID NO: 1492 - protein, 170 aa, Artificial Sequence
  Description of Artificial Sequence:  Synthetic peptide
MKNSLPLCMIAALAENRVIGRDNQLPWHLPADLKHFKALTLGKPIIMGRKTWDSLGRPLPGRLNLVVSRQPGLQLEGAEVFASLDAALERAEAWAREEDAEELMLIGGAQLYELGLAQAERLYLTRVGISPQGDAYFPDVDEAGWHLSSAIEHPEGMETPGYVFEVWDRK

SEQ ID NO: 1493 - protein, 171 aa, Artificial Sequence
  Description of Artificial Sequence:  Synthetic peptide
MNESRLPLALIAAVAANGAIGRDNRLPWHLPADLRHFKASTLGKPVIMGRKTWDSLGRPLPGRLNLVVSRQPGLVLEGAETFASLDAALTRADTWAREQGAGELMLIGGAQLYVESLPRAERLYLTRVDLAPQGDAFFPAWNPADWRLVSREEHPATAQAPGYAFELWERG

SEQ ID NO: 1494 - protein, 170 aa, Artificial Sequence
  Description of Artificial Sequence:  Synthetic peptide
MKKSLPLSLIAALAQNRVIGVDNSMPWHLPGDFKFFKATTLGKPIIMGRKTWDSLGRPLPGRLNIVVSRQTGLMLEGAEVYPSLKAAVARAEEWALEQGANELMLIGGAQLYSQGLEQADRLYLTRVALSPEGDAWFPEFDEQQWKRVSEVPNPAEGDKPAYSFEVWEKR

SEQ ID NO: 1495 - protein, 170 aa, Artificial Sequence
  Description of Artificial Sequence:  Synthetic peptide
MTKSLPLSLIAALGENRVIGVDNSMPWHLPGDFKYFKATTLGKPIIMGRKTWDSLGRPLPGRLNIVVSRQAGLVLEGAEVYPSLEAAVVRAEEWAKDQGVDELMLIGGAQLYAQGLAQADRLYLTRVALSPEGDAWFPEFDLNQWKLVSNVPNPAEGDKPAYNFEVWEKA

SEQ ID NO: 1496 - protein, 169 aa, Artificial Sequence
  Description of Artificial Sequence:  Synthetic peptide
MSEVKLALIAAMARNRVIGRDNAMPWHLPEDLRYFKATTLGKPIVMGRKTFDSLGRPLPSRTNIVVSRQPDLTLEGAQVFASIDAALSAARQQAQADGVDEVMVIGGDNLYRQTLERADRIYLTRIDSEPEGDAWFPDFDEQAWTLGSERAVGSGEGYPAHVYQVLGAR

SEQ ID NO: 1497 - protein, 171 aa, Artificial Sequence
  Description of Artificial Sequence:  Synthetic peptide
MAKIAMVAAMANQRVIGLNNQMPWHMPADLKHFKRITLGKPIVMGRKTYESIGRALPGRLNIVITSDQNYQLADASIVHSCEQAIAVATSHMQNDGMPEHDQEVMVIGGGTVYQHFLPHANRLYLTFIDLDTPGDTYFPNYSDGAWQEIESESNDPDEKNPHSYRFVTLAR

SEQ ID NO: 1498 - protein, 188 aa, Artificial Sequence
  Description of Artificial Sequence:  Synthetic peptide
MDITVNCIVAVDEQLGIGKNGTMPWPYLRNEMMYFQKMTSTPSVVGEKNVVIMGKRTWFSIPEKKRPLVNRINIILSRELREPPHGAHFLARTLDDAFNFYRQYKLKEQLNTVWVIGGKSVYESVLNYKCPLKLYITRIMESFDCDVFFPSINFTEYTMLSEIPGKDTNFEENGIKYKFQVYEKNFNK

SEQ ID NO: 1499 - protein, 171 aa, Artificial Sequence
  Description of Artificial Sequence:  Synthetic peptide
MSMPTLAIVVARAANGVIGRDGDLPWRLKSDLALFKANTLFKPIIMGRKTWDSLPRKPLPGRTNIVLSRDQSFEPEGAVACETWMEAFEIAREQAADDGADEVCVIGGSALFELALPKAKRLYLTEVAAEVEGDVRFPAFDESAWTEVRREAHPAGDGDDHAFVFRVLERR

SEQ ID NO: 1500 - protein, 165 aa, Artificial Sequence
  Description of Artificial Sequence:  Synthetic peptide
MSEAKKPTLTLVAAMAANRTIGVDNKLPWHLPEDLKHFKAATLGKPVIMGRKTWDSIGRPLPGRRNIVVTRQAAWRADGAETAHSLQEALALAGAVEEACLIGGADLYRQAMALADRLCLTEIARDYDGDAHFPAFAADEWREVSREQAVSAAGLPYAFVEYRRR

SEQ ID NO: 1501 - protein, 189 aa, Artificial Sequence
  Description of Artificial Sequence:  Synthetic peptide
MAEKKLNLIAAACTSKGKMGIGINGNLPWRLRQEMAYFERLTKTAQMEGMKNAVIMGRKTWDSIPEKFRPLKDRVNVVLSNSLTECPPGADHLCSSLNEAVKLFSSPPLSETVDMVWITGGSAVYKDGIDSPHCHRIYLTRIMKEIECDTFFPEFDLDRFKLVTDPAVDQDTQEEKGIQYKFEIYESSS

SEQ ID NO: 1502 - protein, 160 aa, Artificial Sequence
  Description of Artificial Sequence:  Synthetic peptide
MLFSLIVAATKNQVIGKDNQMPWHLPADLAWFRRNTTGKPVIMGRKTFESIGRPLPKRMNIVLSRRPFEHEGVIWKDSLESAVDFVQDFDEIMLIGGGELFKQYLPKADKLYLTQIQAEIEGDTFFPELNWNEWEIEHEERHSADENNAYDLRFLILRRK

SEQ ID NO: 1503 - protein, 164 aa, Artificial Sequence
  Description of Artificial Sequence:  Synthetic peptide
MTFSLIVAMTKNHVIGKDNQMPWHLPADLAWFRQNTTGKPVIMGRKTFESIGRPLPKRTNLVLSRQPYLHEGVIWQNSLESAVDFVKDSPEILLIGGGELFKQYLHKADKLYLTEIQTELEGDTFFPEIVWQDWQIEYEAWHQADEKNPYDCRFLILSRNTKNE

SEQ ID NO: 1504 - protein, 168 aa, Artificial Sequence
  Description of Artificial Sequence:  Synthetic peptide
MVVGMTEKNVSLIVAIASNGVIGKDNQLPWHIPEDLKWFKENTLGKPVIMGRKTWDSIGRPLPKRPNIVVTRQLDWRAEGAHAAHSLDEALKLAAELAPEASELMVIGGNALFAEALARATRLYLTEIRRAYEGDTVFPAFDRARWKEVTRRPNDGDPAFDFVILDRA

SEQ ID NO: 1505 - protein, 161 aa, Artificial Sequence
  Description of Artificial Sequence:  Synthetic peptide
MKLSIIVAMTKNHVIGKNNQMPWHLPADLAWFRQNTGGKPIIMGRKTFESIGRPLPNRTNIVLSRSPYEHDGIIWKDNLQSAVDFVRENHHEIMLIGGGELFKQYLPQANKLYLTEIQTELEGDTFFPEFNWQEWQIEFEQQRPADEKNPYACRFLILNRK

SEQ ID NO: 1506 - protein, 160 aa, Artificial Sequence
  Description of Artificial Sequence:  Synthetic peptide
MTFSLIVATTLNNVIGKDNQMPWHLPADLAWFRQNTTGKPVIMGRKTFESIGRPLPKRTNIVLSRQLFEHEGVIWKDSFESAVNFVRDFDEIMLIGGGELFKQYLPKADKLYLTQIQTELDGDTFFPQLNWEEWEIEFDEYRKADEQNRYDCRFLILTRK

SEQ ID NO: 1507 - protein, 162 aa, Artificial Sequence
  Description of Artificial Sequence:  Synthetic peptide
MKISLIVARTLNHVIGKENQMPWNLPVDLAWFRQNTLGKPVIMGRKTYESIGRLLPKRPNIILSRSGFCVEGAYTAQNFAQAAELAETFANTDEIMVIGGGELFKQTIPQADRLYLTEIQAEIEGDTLFEFDESNWTLVEEKWSEIDEQNAYRCRFMILERK

SEQ ID NO: 1508 - protein, 161 aa, Artificial Sequence
  Description of Artificial Sequence:  Synthetic peptide
MTLSLIVAATKNHVIGKDNQMPWHLPADLKWFKENTLGKPVIMGRKTFESIGRPLPKRVNIVLSRHPFEHEGVIWKESLESAVDFLKDSAEIMLIGGGQLFEQYLSQADKLYFTEIQTELEGDTFFPAINTDEWEISYEEYRPADENNAYDLRFLILERKS

SEQ ID NO: 1509 - protein, 166 aa, Artificial Sequence
  Description of Artificial Sequence:  Synthetic peptide
MTTLTLIVARARNGIIGRDNQLPWKLPEDLAFFKRTTMGAPIVMGRKTHESIGRPLPGRRNIVVTRDPARRFDGCDTVTSLADALALASRDGAAEAFLIGGAQLYAEGLMLADKLIVTEIDADFDGDAAFPAPDPAHWREVSRDPHQAAAPNTFGYAFVVYARKRD

SEQ ID NO: 1510 - protein, 186 aa, Artificial Sequence
  Description of Artificial Sequence:  Synthetic peptide
MRATVPVKSAPFRFPSSPTFMTTLTLIVARARNGIIGRDNQLPWKLPEDLAFFKRTTMGAPIVMGRKTHESIGRPLPGRRNIVVTRDATRRFEGCDTVTSLADALALAARDGVPEAFLIGGAQLYAEGLMLADKLIVTEIDADFDGGASFPAPDAAHWQEVSRDAHQAAAPNTFGYAFVVYTRKRD

SEQ ID NO: 1511 - protein, 166 aa, Artificial Sequence
  Description of Artificial Sequence:  Synthetic peptide
MTLLTLVVARARNGTIGRNNTLPWRLPEDLAHFKRTTMGAPIIMGRKTWDSIGRPLPGRRNIVVSRNADLKLQGAEVATSLEDAQRLCVGVEQVFLIGGAQLYAEALPSADRLVVTEIDADVEGDAFFPAIDQAKWIETSRETHHSEANGFDYAFVTYDRPPSGEE

SEQ ID NO: 1512 - protein, 148 aa, Artificial Sequence
  Description of Artificial Sequence:  Synthetic peptide
CIGAGNAMPWHIPEDFAFFKAYTLGKPVIMGRKTWESLPVKPLPGRRNIVISRQADYCAAGAETAASLEAALALCAGAEEAVIMGGAQIYGQAMPLATDLRITEVDLSVEGDAFFPAIDRTHWKEAERTERRVSSKGTRYAFVHYLRY

SEQ ID NO: 1513 - protein, 175 aa, Artificial Sequence
  Description of Artificial Sequence:  Synthetic peptide
MVQARPAIEGQAMTPSVALIVAVAANGVIGKDNALPWHIPEDLKWFKENTLGKPVIMGRKTWESIGRPLPKRPNIVVTRQTGWRAEGAHTAHSLDEALALAARLAPEAAELMVIGGNSLFAEALPGARRLYLTEIARAYEGDTMFPAFERGLWHEVSRRRNEGDPAFDFVILDRA

SEQ ID NO: 1514 - protein, 173 aa, Artificial Sequence
  Description of Artificial Sequence:  Synthetic peptide
MTHIKLAIVVAVAKNGVIGRDGDLPWRIPSDLKRFKQVTLGKPVVMGRKTWDSLPRKPLPGRANFVISRSVTAAAGAYVFADVEACLEEARGAAVEAGVDEVCLIGGAQLYADLLPKVDRIYLTEVDLEPEGDAGFPDLSPEEWREVSAETVEAAEGDDAGFTLRVLDRVRAS

SEQ ID NO: 1515 - protein, 167 aa, Artificial Sequence
  Description of Artificial Sequence:  Synthetic peptide
MTLLTLIVARARNGVIGRDNTLPWRLPEDLAHFKRTTMGAPIVMGRKTYESIGRPLPGRRNIVVTRSAKLALPGCEIAHSLEDAQRLCIGVEQIFLIGGAQLYADALPSADRLIVTEIDADFEGDAHFPAPDPAVWHEVARETHHAAAPNDFDYAFVTYERPPSDEQ

SEQ ID NO: 1516 - protein, 161 aa, Artificial Sequence
  Description of Artificial Sequence:  Synthetic peptide
MFISLIVARTKNHVIGRHNQMPWHLPRDLMWFREKTIDKPIIMGRKTYESIGRLLPKRPNIILSRTELKIDGAYTATSLAEAIELAKKFTAEEIMVIGGGELFKQALPLAQRLYLTEIEADIEGDTYFAFNEQDWQLIRKESSEIDEHNNYVCHFMQFERI

SEQ ID NO: 1517 - protein, 167 aa, Artificial Sequence
  Description of Artificial Sequence:  Synthetic peptide
MPMSATPLLSLVVAYSTNRVIGRDNALPWKLPGDLAHFKRTTLGHPIIMGRNTWESLGRPLPGRTNIVITRNPAYDAAGAVVVGSLAAAIQACGDAAVACVIGGAQIYAQALPLAQRVVATEVHAEIEGDAFFPPLPAGQWRETQRAAQPAENGLRYDFVEYERVAG

SEQ ID NO: 1518 - protein, 167 aa, Artificial Sequence
  Description of Artificial Sequence:  Synthetic peptide
MTTLTLIVARARNGVIGRDNRLPWKLPEDLAFFKRTTMGAPIVMGRKTHESIGRPLPGRRNIVVTRDAARRFDGCDTVTSLDDALALAARDGAAEAFLIGGAQLYEEGLRHADKLIVTEIDQDFEGDASFPEPDPAQWEAVSRDAHRAAQPNDFTYAFVVYRRRRAG

SEQ ID NO: 1519 - protein, 164 aa, Artificial Sequence
  Description of Artificial Sequence:  Synthetic peptide
MRINMIFARAANGVIGNNNRMPWHLPEDMAHFKRLTQGWPVIMGRKTWDSLPPKFRPLPGRTNIVITRQQDWKEDGAEPAASLADALSLCGQSEEVWVIGGAQIYAQAKPLAQRIEVTEIAQDFEGDAFAPPLGSEWIEAAREDHISSNGLKFSFITYDKHKGN

SEQ ID NO: 1520 - protein, 166 aa, Artificial Sequence
  Description of Artificial Sequence:  Synthetic peptide
MTLLTLIVARARNGVIGRNNTLPWRLPEDLQHFKRTTMGAPIIMGRKTWDSIGRPLPGRRNIVVTRNRDLHIEGADVVGSIEDAQRLCIGAEQVFLIGGAQLYAEALPSADRLIVTEIDADVEGDAFFPAVDRTTWVETARELHHSETNGFDYAFVTYERPASGEE

SEQ ID NO: 1521 - protein, 163 aa, Artificial Sequence
  Description of Artificial Sequence:  Synthetic peptide
MPEIILIAAVAKNRVIGKDNTLIWNLPEDMAHFKALTAGQTVVMGRKTWESLPPRFRPLPGRRNVVISRQADYAAPGAEVANSLENALQLASTAESVFIIGGEQIYKQAMAVADRLEITDVDLEPAGDAWFPEIAATDWSVTQKNTPPSQSGTGFSFVTYRRK

SEQ ID NO: 1522 - protein, 165 aa, Artificial Sequence
  Description of Artificial Sequence:  Synthetic peptide
MSVVLSIVVARAENGAIGVENTLPWRLSNDLQYFKQVTMGKPIIMGRKTFDSIGRPLPGRTNIVVTRNKDWRHDGVNVAHSLDEAVSLAAREQAEEVMLIGGAELYRQGLAAAQRVYLTEVKTSVQGDAFFPELDLADWRETSRESHPADEKNQYPHDFVVFERS

SEQ ID NO: 1523 - protein, 171 aa, Artificial Sequence
  Description of Artificial Sequence:  Synthetic peptide
MELVIVVAAAQNGVIGINNTLPWRISADLQHFKQVTIGHPIIMGRKTYDSIGKPLPGRTTIVVTRQADWQAEGYEDQVKVAYSLEGAMELAEQIAAQMGVAEAMLVGGAQLYRQALERVSKVHLTRVHAEIEGDAWFPELDGNIWAEVQCVRYKADEKNEYDYSFVELHRR

SEQ ID NO: 1524 - protein, 164 aa, Artificial Sequence
  Description of Artificial Sequence:  Synthetic peptide
MKLHLIFARSANGVIGLNGKLPWHLPEDLAHFKRTTLGSPVIMGRKTWDSLPPKFRPLPGRLNVVVTRQPHWQAAGALTAHSLAEACALCPSDSHAWVIGGAELYLQALPMASTAVVTEIDANFEGDAFAPQFGPQWRETARERLVSSTGLSFSFVTYCRNTGV

SEQ ID NO: 1525 - protein, 154 aa, Artificial Sequence
  Description of Artificial Sequence:  Synthetic peptide
MTQVTLIAAVGRNGVIGADNDMPWHLPEDFAFFKRTTMGHAMVMGRKTFDSIGRALPGRRTIVITRQPDWHHADVETVHSLDDALGLAGPVGEVFVAGGGEIYAQAMPFAHRLLITEVDQEPEGDVRFPDIDPAQWHESAREERDGFAWVTYER

SEQ ID NO: 1526 - protein, 166 aa, Artificial Sequence
  Description of Artificial Sequence:  Synthetic peptide
MNTPRINLIYARAANGVIGRNNAMPWHLPEDLAHFKRLTQGWPVIMGRKTWDSLPPRFRPLPGRTNLVITRQPDWQAPGALPAASLADALAQCSQSEEVWVIGGAQIYAHAEPLADRIEVTEIAQDFDGDAFAPPLGEEWQETAREAHVSSHGLPFSFVTFEKASA

SEQ ID NO: 1527 - protein, 166 aa, Artificial Sequence
  Description of Artificial Sequence:  Synthetic peptide
MPAPRISLIAAIARNGVIGRDNGLAWRLSSDLKRFKALTMGKPILMGRKTWDSIGRPLPGRRSIVLTRDRTLTIPDVAVVHDWPEALAAAGSEELMVVGGAEIYALALPHADRLHLTEVEAEPEGDASFPAFDRSAFRESFREAHPAGERDEFAFQFVDFERVGGR

SEQ ID NO: 1528 - protein, 161 aa, Artificial Sequence
  Description of Artificial Sequence:  Synthetic peptide
MHLSIIVAMGKNRVIGKDGMLPWHISSDLKNFKKITMGKPILMGRKTYESIGRPLPGRENIVLTKNKNYFAEGCIVKNTIDEVFSYCKKFPELMIMGGAALYEQTLHKAKRLYITEVNATTDGDVFFPEFDRNQWLEISRNSFEAGENDDFDYIFKILERK

SEQ ID NO: 1529 - protein, 170 aa, Artificial Sequence
  Description of Artificial Sequence:  Synthetic peptide
MDLAIIAACARNGVIGRNNDLPWRLPEDLAHFRSTTGGWPVIMGRLTWESLPARFRPLPGRRNIIVSRGGVRGVPKGVDVVASLEAALELVQAERRAFVIGGARLYEAALPLADELFLTEIDEDFEGDVYFPEFDRSAFVEHHRMRRQAEAPNTFTYSFAHYRRKLPARS

SEQ ID NO: 1530 - protein, 165 aa, Artificial Sequence
  Description of Artificial Sequence:  Synthetic peptide
MELWLIAAVARDGAIGRAGTMPWHLPQDLAHFKRTTLGCPVVMGRKTWESLPPRFRPLPGRRNVVVTRNAAWQADGAEAAPSLDAALERLREAERVFVIGGGELYAQALPRADGLVLTEVDTDVPDADTHFPAWDRSAFSEAARESHTDGAPWPYHFVRYERIRR

SEQ ID NO: 1531 - protein, 167 aa, Artificial Sequence
  Description of Artificial Sequence:  Synthetic peptide
MSGTGQPRVSVIAALAKNRVIGIENRLPWRLPEDLAHFKALTLDHPVLMGRKTFESLGRPLPRRTNVVITRNADYRPDGCLVAASMPAAIALCQGADEIFFIGGAELYAQAIPLADRLYLTEVDAEPEGDAWFPEFDRAAFREISRASHVGEKGDVLRFDFVVYERR

SEQ ID NO: 1532 - protein, 166 aa, Artificial Sequence
  Description of Artificial Sequence:  Synthetic peptide
MAQPRISLVAAIARNGVIGRDNSLAWRLSSDLKRFKALTMGKPILMGRKTWDSIGRPLPGRRSLVITRDRSLALSDVTVVHDWDEALAAAGDDELMVVGGAEIYRLALPHADRLHLTEVDAAPEGDAYFPPFDRSLFRETLREAHGPGERDEFAFQFVDLERLGSR

SEQ ID NO: 1533 - protein, 167 aa, Artificial Sequence
  Description of Artificial Sequence:  Synthetic peptide
MSASKPQVIIIAATARNGAIGRDNQLPWRLKSDLARFKETTIGHPVLMGRKTWESLGRPLPARRNLVVTRDRSYSATGAEVFPDPEAALEAAGDETVFVIGGAELYRQLLDSADALLLTEVHADVAGDAYFPPFDRGDFDEVRREQHDADAHNEFSFDFVEYRRKTR

SEQ ID NO: 1534 - protein, 164 aa, Artificial Sequence
  Description of Artificial Sequence:  Synthetic peptide
MIISLIAALTTNHIIGKKNVIPWYLPIDIKWFKYHTLYKPIIMGRKTFESIGKKPLLNRLNIVLSRNLLNNYNGVFIAENIDEALSLIQDAYEVMVIGGSEIYNVFLPRAQRLYLTYIHNMVEIDGDILFPDYDIREWKSIFNSFYKVREDCFCYLHFSILERY

SEQ ID NO: 1535 - protein, 175 aa, Artificial Sequence
  Description of Artificial Sequence:  Synthetic peptide
MSVALKEITKDMNISMIAAMDKHRIIGADNDMPWHLPDDLKFFKANTVNKPVIMGRKTFESIGSKPLPNRRNLVITRNDAYEANGAEVFHSAEEALKSCKSEVEIIIMGGGQLYAQMMPFANKLYVTLVDAEVAGDTTFPEWLTDEWQEISKEWHDKDERHAYAFEFVTLIRKSS

SEQ ID NO: 1536 - protein, 166 aa, Artificial Sequence
  Description of Artificial Sequence:  Synthetic peptide
MSPRPEITLIAALADNGVIGRDNDLPWRIPADLKRFKARTQGRPLIMGRRNYESIGRPLPGRHNIVLTRRRDWQAEGCTVVHDPEAALAAAGDVEEVMVIGGEEIYRLFLPRADRLELTRVHTEVPGDTFFPDIDPADWQVVAEQQPPSEETNDWPLTYQTLERRR

SEQ ID NO: 1537 - protein, 171 aa, Artificial Sequence
  Description of Artificial Sequence:  Synthetic peptide
MLSLIVAMAQNHVIGINNSLPWHLPNDLKYFKKVTMGKPIIMGRKTYESIGKPLPGRRNIVITRQDAYTGVGENDAIDVVSSLDQAIDLGESIALVEGHEEVMVIGGAEIYKQALLKADRLYITHVLADVEGDAYFPQVDWTLYEEVGHEAFAASGHNPYDYRFSIYQVKE

SEQ ID NO: 1538 - protein, 203 aa, Artificial Sequence
  Description of Artificial Sequence:  Synthetic peptide
MISSPLATRIFVWRAMWPIRRSARPSPYRPTDCERRMKLSLVVAVANNGVIGHQGDLPWRLSTDLKRFKAVTMGKPIIMGRKTWQSIGKPLPGRQNIVISRNPAFTAEGAYAAGSLDEAIALAGRQDGIEEICVIGGAEIYRQALSRADILHVTHVEADVEGDAVFPEIDPQVWRPVHSESVPAGEKDVYPTRYVIYERRQAV

SEQ ID NO: 1539 - protein, 171 aa, Artificial Sequence
  Description of Artificial Sequence:  Synthetic peptide
MRKALIVAMARNRVIGRNNKLPWYLPGDLRYFKQATMGKPIIMGRKTWDSIGRPLPGRMNVVISRNPEWQAPAGTVAAASLNEALVKAEAQANLEGGDEVMIIGGGQIYAEALPMVDRIYITQVHAEVDGDAFFPEVNWDEWEEIGREDFSASDNNPYDYSFVVYQRSRSE

SEQ ID NO: 1540 - protein, 172 aa, Artificial Sequence
  Description of Artificial Sequence:  Synthetic peptide
MHVAIYVAIAENGVIGRDGGLPWRLSTDLKRFKADTMGKPIIMGRKTYEGIGRPLPGRLNFVVTRDKTWRAEGVEVAHTLEAAIQLATVRVRCMSGVDEACIIGGGEIYAQALPLADRLHVTHVLAAVDGDAHFPPIDAETWRMVSSQEVPAGEKDSHATRYSVYERRRQIL

SEQ ID NO: 1541 - protein, 172 aa, Artificial Sequence
  Description of Artificial Sequence:  Synthetic peptide
MKKPLVSIVVAASENNVIGQENDMPWRLSTDLKRFKALTLGKPVIMGRRTWQSLGRPLPGRANIVITRDADFRAEGAEVVGSLEDALALARKFAAEGGVDEICVIGGGQIYVQAMPLADRLHLTRVLSVIEGDTYFPEINPQDWQLLSSEDVPAGDKDSYPTRYMLYERRVS

SEQ ID NO: 1542 - protein, 176 aa, Artificial Sequence
  Description of Artificial Sequence:  Synthetic peptide
MTTRPKIVFVVAVAANGIIGREGDLPWRLSTDLKRFKALTIGKPVVMGRKTWASLGRPLPGRPNIVISRNPDFEAPGAEVAPSLETALTIARERAAAVGADEICIIGGGEIYRQSIGMADVLHVTEVQAEVDGDTRFPSIDPATFEKVMEEDLPRSEKDSHAMHFVTWRRRTPPPE

SEQ ID NO: 1543 - protein, 175 aa, Artificial Sequence
  Description of Artificial Sequence:  Synthetic peptide
MSEPRVTIIVAVSENGVIGRDLDMPWKLSTDLKRFKAMTMGKPLIMGRKTFLSVGERPLPGRPHIIVSRNADYRPEGVDVVSSLDEAVKLAKTKAVELGVDEVFVAGGGEIYRQAMPFADQLSVTHVAVKLDGDTFFPEIDPAVFEKTEEKAASAGEKDNYPVLFTTYVRRAAAK

SEQ ID NO: 1544 - protein, 173 aa, Artificial Sequence
  Description of Artificial Sequence:  Synthetic peptide
MTFPVCLIAAVAENGVIGREGAMPWHLSTDLRRFKALTFGKPIIMGRKTWDSLGRALPGRTNIVITRNYAFMAEGAVIAHSLSEACFIAKRVASQNGADAVFIIGGGEIFQQGFNIADRIFLTEVLASIEGDSFFPVFDREMWTIVQTQYIPEGDKDSHRTRFVVYERNNNHL

SEQ ID NO: 1545 - protein, 169 aa, Artificial Sequence
  Description of Artificial Sequence:  Synthetic peptide
MTFPVYLIAAVAQNGVIGREGQMPWHLSTDLKRFKALTLGKPVIMGRKTWDSLGRPLPGRTNIVITRNRTFTAEGAVVTGSLSHAHDIAQKVASQSGADAVFIIGGGEIFKEGLHIADKIFFTEILASIEGDSFFPVFDKENWTIVETQYIPEQDKDSHPTRFVIYERH

SEQ ID NO: 1546 - protein, 169 aa, Artificial Sequence
  Description of Artificial Sequence:  Synthetic peptide
MTFPICLIAAVAKNGVIGREGAMPWHLSTDLQRFKALTFGSPVIMGRKTWDSLRAPLPGRTNIVITRNCAFKAESAVITHSLSHACSIAKKVASQNGADAIFIIGGGEIFQQCFDIADKIFLTEVLDSIEGDSFFPVFDKEKWTIVQTQYIPEGDKDSHPTRFVVYERK

SEQ ID NO: 1547 - protein, 164 aa, Artificial Sequence
  Description of Artificial Sequence:  Synthetic peptide
MKLSLIVAFDRNHAIGRDNDLPWKLPDDLKRFKALTLGKPILMGRKTAQSLGRALPGRLNLVLTRSGQVPFEGMHAVVSVDEAIERAAQEGAQELCVIGGGEVYRLTMERADLLAVTEVDTAVEGADTHFPPIDPAVWVPAERSAHAADARHAFAFSFVDYQRR

SEQ ID NO: 1548 - protein, 161 aa, Artificial Sequence
  Description of Artificial Sequence:  Synthetic peptide
MIITLIAAMDKNRLIGRNNELPWHLPADLAHFKSITLGKPIVMGRRTFDSIGKPLPHRRNIVITQQKNLIIEGCDIFYSLDDALSALTKEPEVIIIGGARIFKEALPKADKMILTIINHSFEGDVYFPEWNDKEWKITSQIKHERDEKNPYPFQFLELRRL

SEQ ID NO: 1549 - protein, 168 aa, Artificial Sequence
  Description of Artificial Sequence:  Synthetic peptide
MIISLIAAFTINYVIGRKNIIPWYFSWDMMWFKYHTMYKPVIMGRKTFESMNSKPLPYRLNIVLSKHHILYNNKIHNIFIACNPIQALSVVQKNDEVMIIGGGLVYNAFMSQCTRMYLTKIDVVYNYGDSWFPSYNPNEWCVVYNTNKKCVINTGYTYNLNFQILDRT

SEQ ID NO: 1550 - protein, 156 aa, Artificial Sequence
  Description of Artificial Sequence:  Synthetic peptide
MKVVAIAAVADNGVIGSGQDMLWHISEDFRRFKTVTMGHTLIFGRRTFEQIGKLPGRRHIICTRDPHWSHEGVDVATSPRQAVEMAREAGEEICFVAGGGQIYADAFELCDELDITEVHQNPNGAARFPAIDPEVWVEVRRESRDGFDFVGYRRRS

SEQ ID NO: 1551 - protein, 165 aa, Artificial Sequence
  Description of Artificial Sequence:  Synthetic peptide
MNHPEITLILARAANGVIGAKGRMPWHLPADLRRFKQLTMGRPMIMGRKTFDSLPAVLEGRRHIVLTRDADWQEEGAEPVASVEEALKRANAPHVMVIGGAEIYALFLPLADRIELTEVGLEPAGDAVIDYPDPALWREVARVDHRAGEAGRPAYSFVTLARRNG

SEQ ID NO: 1552 - protein, 160 aa, Artificial Sequence
  Description of Artificial Sequence:  Synthetic peptide
MTPGGKRVVLVAAVARNGVIGDGPDIPWQLPGEQRLFKGLTWGHILVMGRATYDSIGRPLPGRTTIVLTRSPDWSAEGVHVAHDLPAALALADTLEGEVMVAGGGQVYAAALPVADEQVLSEVDLEPQGDAFYPEFDRSEWRETAREQHDGYDRVVLVRA

SEQ ID NO: 1553 - protein, 165 aa, Artificial Sequence
  Description of Artificial Sequence:  Synthetic peptide
MIISFIVAMDENHLIGANRRLPWHLPADLKYFRRMTMGKPMLMGRSTHEAIGRPLPGRHNIVVTHNPDYKAPGCTVVHTVEAGLQAAGEAEEVTVIGGASLYEQLLPQARRIYLTLVRGHFQGDTWFPAFDPGTWVEVWREDYDPDPQNPYPYSFIRLEREERKK

SEQ ID NO: 1554 - protein, 161 aa, Artificial Sequence
  Description of Artificial Sequence:  Synthetic peptide
MIVTIIAAMAGNRVIGKEGAMPWHLPDDLARFKAITMGHPVVMGRKTFESIGRPLPGRLNIVLTRQAGYAPSGVTVARTLAEALILAGTAGEVFICGGGEVYREALPLADRIHLTVIHRAYGGDTTFPELPADFEETCREHGEGKPPHSFITFERRRGSTP

SEQ ID NO: 1555 - protein, 178 aa, Artificial Sequence
  Description of Artificial Sequence:  Synthetic peptide
MTGTVPQRPEIVLVVAVAENGIIGQRNEIPWRLKADLQRFKAITIGKPIVMGRKTFDSLRRPLSGRTNIVITRDPGFTAAGALVTRSLADALAIAKGDALRRSVTEIAVIGGAEIYNASMPVADRLEVTEVHATVDGDTVFPPIDLLIWHEIARCRNKAAAGDTADHSYVTYRRRTQH

SEQ ID NO: 1556 - protein, 164 aa, Artificial Sequence
  Description of Artificial Sequence:  Synthetic peptide
MKLTLIVAFDRNNAIGRDNDLPWKLPDDLKRFKALTLGKPILMGRKTAQSLGRALPERLNLVLTRSGQVPFEGMHAVASVEQAIERAAQDGAQELCVIGGGEVYRLTMQRADLLAVTEVDTVVDGADTHFPPIDPALWEAVQRESHAADARHAFAFDYVDYRRR

SEQ ID NO: 1557 - protein, 169 aa, Artificial Sequence
  Description of Artificial Sequence:  Synthetic peptide
MEIVFVVAVAENGVIGAGNAIPWRQKSDMARFKALTIGKPVIMGRKTFESLPRPLPGRTNIVITRDPAYRAAGAVVTTSAVDAEAIARGDALRRSVTEIAVIGGAEIYRQWFGRADRLEITEVHARPDGDTHFGIDKAEWEETARIRHPAGPNDSADYSYVTYRRRPRH

SEQ ID NO: 1558 - protein, 166 aa, Artificial Sequence
  Description of Artificial Sequence:  Synthetic peptide
MIVSLIAALDRYRAIGRDNGLPWHLPDDLKRFKALTLGRPVLMGRKTAHSLGRPLPGRTNLVLTRSGHVPFSEMRAVDSLDAAIVQAAAEGADTLSVIGGGELYALTLPHANAMYLTHVDVAVAGADTYFPMFDAVDWEIKNREPHQGDGRHAYPFTFIDYCRRLR

SEQ ID NO: 1559 - protein, 180 aa, Artificial Sequence
  Description of Artificial Sequence:  Synthetic peptide
MISNAAEMSDVAIVLVVAVADNGVIGQGNAIPWRLKSDLQRFKQLTLNKPVIMGRKTYQSIGRPLPGRTNIVITRDAAFTAPGVVVAPSFAAAEQVARGDALRRFATEIAVIGGAEIYAQWLPLAARIELTEVHAQPAGDTSFPPIDPELWREVARERHTAGPHDSADFSYVTYRRDAAC

SEQ ID NO: 1560 - protein, 170 aa, Artificial Sequence
  Description of Artificial Sequence:  Synthetic peptide
MTRPPDISLIVAMARNRVIGADNAMPWHLSADLKRFRALTLGKPVLMGRKTHESIGRVLPGRQNIILTRSPDFHAPGCTIVHDLGELATVCSGAPELMVIGGSAVYEALLPRARRLYLTLIDHDYPGDTYFPEFAAADWREISREDVRNDPDFPWPYSYLVLERASPEAR

SEQ ID NO: 1561 - protein, 178 aa, Artificial Sequence
  Description of Artificial Sequence:  Synthetic peptide
MTVAVFPHPEIVLVVAVAESGVIGQRNQIPWRLKADQQRFKAITMGKPIVMGRKTFDSLRRPLPGRTNIVITRDPDFAAVGAVATRSLADALAVAKGDALRRSVTEIAVIGGAEIYAASMPVADRLEVTEVHAGVDGDAVFPAIDPSVWRETARCRNRAAAGDAADYSYVTYRRRTPH

SEQ ID NO: 1562 - protein, 178 aa, Artificial Sequence
  Description of Artificial Sequence:  Synthetic peptide
MTGTVSPRPEVILVVAVAENGVIGQRNGIPWRLKADLRRFKAITIGKPIVMGRKTFDSLRRPLPGRTNIVITRDPDFTAVGALVARSPADALVIAKGDALRRSVAEIAVIGGAEIYAASMPAADRLEVTEVHTAVDGDTIFPPIDPSVWDEIARCRNKAAAGDTADFSYVTYRRRVRH

SEQ ID NO: 1563 - protein, 179 aa, Artificial Sequence
  Description of Artificial Sequence:  Synthetic peptide
MIVPGADARVSIVIIVAVAENGVIGEGNAIPWRLKSDQRRFKQLTLNKPVIMGRKTYQSIGRPLPGRTNIVVTRDTHFQAAGVVVAPSFEAAERVAAGDAMRRSATEVVVVGGSEIYAHWLPRATCIELTEVHASPQGDTTFPAIDPDQWEEVARTRHGAGPEDSVEFSYVTYRRCTAR

SEQ ID NO: 1564 - protein, 171 aa, Artificial Sequence
  Description of Artificial Sequence:  Synthetic peptide
MIDTILIVAVADNGVIGHRGAMPWRLKSDLQRFKALTLGKPVVMGRKTFASIGRPLPGRTNIVVSRDDSLKLPGAIVTTSFAEARRIAQGDALRRFATEIAVIGGAEIYQQFLGEADRIELTEVHACPEGDTVFAPLDAAQWQETARIRHAAAEGDSADFSYVTYRRRTPR

SEQ ID NO: 1565 - protein, 179 aa, Artificial Sequence
  Description of Artificial Sequence:  Synthetic peptide
MSSPGVSSRLSIVLIVAVADNGVIGRDNAIPWRLKSDLQRFKQLTLNKPIIMGRKTYQSIGRPLPGRTNIVVTRDPTFHADGVVVVPSFDAAEQVACGDAMRRFATEIAVIGGAEIYAHWLPRATRIELTEVHASPPGDATFPALDPSQWEETARTHHAAGPQDSADVSYVTYRRCTAR

SEQ ID NO: 1566 - protein, 171 aa, Artificial Sequence
  Description of Artificial Sequence:  Synthetic peptide
MIQIVLIVAVADNGVIGSAGALPWRLKSDLQRFKQLTLNKPVVMGRKTFASIGRPLPGRTNIVMTRDTGLTLPGAVVTSSFDTAQAIARGDALRRFATEIAVIGGAEVYAQWLAVADRIELTEVHASPAGDAHFAALDAAAWEEAGRIRNAAAADDSADFSYVTYRRRTVR

SEQ ID NO: 1567 - protein, 170 aa, Artificial Sequence
  Description of Artificial Sequence:  Synthetic peptide
MIEIVLIVAMAENGVIGAAGAIPWRQKSDMQRFKAMTMGRPIVMGRKTFISFPRRPLPGRTNIIVTRDAAFHAPGAIVTHSVGEALTIARGDALRRSAAEIAIIGGAEIYAATMPLADRLEITEVHMSPPGDTLFPAVDPARWEQVARERHASGPDDQADFSYVTYRRKR

SEQ ID NO: 1568 - protein, 156 aa, Artificial Sequence
  Description of Artificial Sequence:  Synthetic peptide
MIYARAANGTIGKDGGMPWHLPTDLKRFKRLTTGHVLIMGRKTFESFPDPLPGRRHIVLTRDEDWGADGAEVAHSRAEALQLAGEEPVAIIGGAEVYALFEQEAERIELTQIHAKYEGDTFMDAPGPDWREIARDEYEAEDGRPAFSFVTFLRAER

SEQ ID NO: 1569 - protein, 170 aa, Artificial Sequence
  Description of Artificial Sequence:  Synthetic peptide
MEDYEIVLIYARASNGAIGFEGRLPWHIPADLKRFKALTMGKPMIMGRKTFESLPGLLPGRRHIVLTRRDSWDSEGAEHVCSVDEAIATAKDGNETGEIAVVGGSAIYDVFRPVAHRIEVTEIHAEYKGDVFMKPLGAEWKVEAREDHTADGEMPAYSFVTYVRQDEESA

SEQ ID NO: 1570 - protein, 165 aa, Artificial Sequence
  Description of Artificial Sequence:  Synthetic peptide
MPSLSEIMLIFARAQNGVIGKDNTMPWHISADLKHFKALTLGHPMIMGRRTFESLPGLLPKRPHIVLTHNHHWQAEGAEAVCDLEEAIKAARKYSSQIAVIGGANIFQQFWDKADRIELTEIYRDYSGDTFVDLPDMNHFSLVGQEDFKAEGECPAFSFKSFLRK

SEQ ID NO: 1571 - protein, 159 aa, Artificial Sequence
  Description of Artificial Sequence:  Synthetic peptide
MSIALIWAQARNRVIGAGGTMPWRLPEDLRHFRELTGGEPVVMGRRTWESLPDRFRPLPGRRNIVVTRQEGWNAPGAEVAHALPGALSAASDDTVWVIGGGELYRQALPLADRVEVTEIDLAVAGDTPAPALGPEWHAQPTPWLTAENGMRYRFLRYLR

SEQ ID NO: 1572 - protein, 161 aa, Artificial Sequence
  Description of Artificial Sequence:  Synthetic peptide
MISHIVAYTKNRVIGRDNEMPWHLPADLAHFKKTTYGKPVIMGRKTFLSIGRPLPGRENIVITRDPDFHAEGITIWHDLDRLADYAESDEEVFLIGGGELFQQTLPLIERIYATEIDAHIEGDVYYPVLPDHFVCSSETYHPVDTQHAEAFTIKQFDRVPE

SEQ ID NO: 1573 - protein, 165 aa, Artificial Sequence
  Description of Artificial Sequence:  Synthetic peptide
MTVVGLIWAQSTTGVIGRDGGMPWRVPEDLTRFKQLTMGHPVVMGRRTWDSLPVGVRPLPGRRNIVLSRQIDFMAEGAEVFGSLEETISNLETEPEMWVIGGEQIYRLALPLATRCGVTEVDTYLLHEDDDVLAPVLDDTWVGVTGEWLVSCSGLRYRLHSYHRS

SEQ ID NO: 1574 - protein, 194 aa, Artificial Sequence
  Description of Artificial Sequence:  Synthetic peptide
MSTDNAMDPLAFTEKIADGTTGVGLVWAQTTAGVIGKDGDMPWHLPEDMKHFTRLTTGHPVIMGRKTWLSFPDKYRPLPGRTNIVVTRQEGWGDTPDARGAIAVKSLDDALLESQFAPGHETVWVLGGGEIFAQTLDIADVAVVTFIDSETDGDTYAPELGYEWKLAASEPATGWLTSATGTRYRFTMWRRTEA

SEQ ID NO: 1575 - protein, 163 aa, Artificial Sequence
  Description of Artificial Sequence:  Synthetic peptide
MIGLVWAQSRNGVIGAGGRIPWRVPEDLAHFSALTAGSTVVMGRATWESLPARFRPLPGRRNLVLSRDPGYAAEGAEVVHDLPGALAGAGDVWVIGGSAVYRAALEHADVLVVTEVDLVVEGDTRAPEVGPGWERVEVGDWATSTGGPRFRIGTWRRSGRSPR

SEQ ID NO: 1576 - protein, 172 aa, Artificial Sequence
  Description of Artificial Sequence:  Synthetic peptide
MTRAEVGLVWAQSTSGVIGRGGDIPWSVPEDLTRFKEVTMGHTVIMGRRTWESLPAKVRPLPGRRNVVVSRRPDFVAEGARVAGSLEAALAYAGSDPAPWVIGGAQIYLLALPHATRCEVTEIEIDLRRDDDDALAPALDDSWVGETGEWLASRSGLRYRFHSYRRDPRSSV

SEQ ID NO: 1577 - protein, 171 aa, Artificial Sequence
  Description of Artificial Sequence:  Synthetic peptide
MNTIVSTRTIGLIWAQTTDGVIGFENTIPWRVPEDMANFRTVTWGHPVIMGRRTWDSLPPKFRPLAGRRNVVVTRQPDWSAPGAERAGSLTEALALTEPESVWIAGGAQIYETAMDFATELLVTEVQVSVQGDAHAPVIGAQWRLAEAGPERTSTTGLKFRINRYVRRTRS

SEQ ID NO: 1578 - protein, 163 aa, Artificial Sequence
  Description of Artificial Sequence:  Synthetic peptide
MISFIVAMDKHRLIGKENDLPWRLPADLAHFKRVTSGHTVIMGRKTYESIGKPLPNRRNVVVTRSQAYTAEGVDIVHSIDEAIRLTEHENETFVIGGSELFKAFWPHADRMYVTYIDEVFDGDTYFPEIDGQEWELVSVEAGTIDEKNVYPHEFRVYERQAKN

SEQ ID NO: 1579 - protein, 161 aa, Artificial Sequence
  Description of Artificial Sequence:  Synthetic peptide
MKISLISAISNNLVIGHNNKIPWYLPEDLKWFKKNTIHKDIIMGRLTWESILNHPLPMRKNIVISHKEIIHKDVIWANSISKALLSTTYDKEIMVIGGSKIYKQMLFYATKLYLTHVDFNGIGDTYFPQYKSCKFWKTIFRKQHFKDKNNPYNFCFEILSR

SEQ ID NO: 1580 - protein, 161 aa, Artificial Sequence
  Description of Artificial Sequence:  Synthetic peptide
MIGAIWAQGLDGVIGDGAGMPWHIPEDLRHFKEVTLGQPVIMGRKTWESLPERFRPLPGRENFVLSRREPGDWSTGATVVRELPAAGWIIGGGEVYRATIEHTDVLEVTVIDATFADELGDRAVYAPEIPDFFTLETDTGWQDSDTHRFRFQRWVNNNHIA

SEQ ID NO: 1581 - protein, 170 aa, Artificial Sequence
  Description of Artificial Sequence:  Synthetic peptide
MRPRIALIAAAASNGTIGLEGGMPWHISEDLKYFKRVTMGAPVIMGRKTYASIGSALPGRANIVITRNTAFSSDDADVVHDVATGLCKAQAIAEIDGSDEVFVIGGAEIYSQVLAAADKIYLTEIDGEFPGDAFFPDLDTTQWREVSREPRAPEMEGGPVFSFVVYTRMR

SEQ ID NO: 1582 - protein, 170 aa, Artificial Sequence
  Description of Artificial Sequence:  Synthetic peptide
MKPRVALIAAAASNGAIGLEGGMPWHISEDLKYFKRVTMGAPVVMGRKTFASIGSALPGRVNIVITRNKLFSSDDADMVHDVDAGLRKAAAIAEIDGSAEVFVIGGAEIYAQALAVADRIYLTEIDGEFPADAFFPDLDTLQWREVSREPHAPEMGGGPAFSFVVYDRMC

SEQ ID NO: 1583 - protein, 162 aa, Artificial Sequence
  Description of Artificial Sequence:  Synthetic peptide
MISLIAAMDRNRLIGKDNDLPWHLPQDLKYFKEVTKGHAVIMGRKTFESIGRPLPHRENIIVTSNKELDIPNCQVMHSAEEAVRFAKNRNEECFVIGGSTLYTEILPFADKLYVTKIDETFEGDRYFPEFSEAEWEIVSRRKGLKDDKNPYDYEFLVYQRKG

SEQ ID NO: 1584 - protein, 189 aa, Artificial Sequence
  Description of Artificial Sequence:  Synthetic peptide
MSDATPRTETSCIETVVPIALVAAMSRNRVIGVDNKLPWHLPEDLKFFKAVTMSKPLVMGRKTFESIGRPLPGRLNIVVTRDRGYAQDHDGIRVCHDLASALDMADGQAIIDGVEDICVIGGGEIFAEALPCATRLYLTEVDIEVEGDAWFPAFDAREWQETQRVPGQGGEGKPEYAFVHYTRRDDAGI

SEQ ID NO: 1585 - protein, 165 aa, Artificial Sequence
  Description of Artificial Sequence:  Synthetic peptide
MANLSLIVAVARNRVIGLNNALPWHLPEDLKRFRALTTGHHIIMGRKTYESLNRLLPDRTTIIVTRNQNYHVPGAMIAHSLEQAIDMAADDAEAFLIGGAELYQAGLKLADRLYITEIDAEFAGDAFLPAFDLRDWQKVASEEMVSAQGLPFRYITYVRKNSKMP

SEQ ID NO: 1586 - protein, 166 aa, Artificial Sequence
  Description of Artificial Sequence:  Synthetic peptide
MSPRISLVVAVADNGVIGKDGTLPWRMRDDLKWFKSVTTGKPIVMGRTTWESLGDPLPQRRNIVVSRQLDNAPEGSEVFAELDEALTAAAGSGADEICVIGGAQLYTAAMARADRLYVTRVHGTPEGDTLFTLPDETGWTRTILRRIEKGSHNDFDATVEQWDRKA

SEQ ID NO: 1587 - protein, 161 aa, Artificial Sequence
  Description of Artificial Sequence:  Synthetic peptide
MNISLIAAISKNLVIGYKNKIPWYLPEDLKWFKQKTINKNIIMGRLTWESIKKKPLPMRKNIVISSNEIKQEGIIWADSISNAIISAQYNQEIMIIGGAKIYKEMLFYANKLYLTHIDIDIVGDAYFPEYKLYPYWKTLFRKKNTKNKMNPYNYSFEILSR

SEQ ID NO: 1588 - protein, 165 aa, Artificial Sequence
  Description of Artificial Sequence:  Synthetic peptide
MISFIFAMDANRLIGKDNDLPWHLPNDLAYFKKITSGHSIIMGRKTFESIGRPLPNRKNIVVTSAPDSEFQGCTVVSSLKDVLDICSGPEECFVIGGAQLYTDLFPYADRLYMTKIHHEFEGDRHFPEFDESNWKLVSSEQGTKDEKNPYDYEFLMYEKKNSSKA

SEQ ID NO: 1589 - protein, 162 aa, Artificial Sequence
  Description of Artificial Sequence:  Synthetic peptide
MISLLLAMDRNHVIGVNNQLPWHLPKDLRFFKEKTTGNTIIMGRKTFESMGGALPNRKNIVLTSRSDVQYPNAKIIHHIDTIKQWNIENPEEEYFVIGGANLFQQVMDIADRMYITWIDESFTGDTFFPKFNQEDWIISSKIKGDKDEKNPYDYYFIQYDRK

SEQ ID NO: 1590 - protein, 164 aa, Artificial Sequence
  Description of Artificial Sequence:  Synthetic peptide
MNISIIVAMSQNLVIGQKNSIPWNIPKDLSWFKKHTIKKSIIMGRKTWESIGRVLPMRQNIVLTRQKNIKNTNVLFVNSISKAIQSALYKNEIMIIGGSNLYNQMLTSANKLYITHIEKYILGDTYFPTYDHLPWKIIFKKKIIEHEKTKNSFYVTFKILKKIT

SEQ ID NO: 1591 - protein, 162 aa, Artificial Sequence
  Description of Artificial Sequence:  Synthetic peptide
MIVSFMVAMDENRVIGKDNNLPWRLPSELQYVKKTTMGHPLIMGRKNYEAIGRPLPGRRNIIVTRNEGYHVEGCEVVHSVEEVFELCKNEEEIFIFGGAQIYDLFLPYVDKLYITKIHHAFEGDTFFPEIDMTNWKEIFVEKGLTDEKNPYTYYYHVYEKQQ

SEQ ID NO: 1592 - protein, 167 aa, Artificial Sequence
  Description of Artificial Sequence:  Synthetic peptide
MLRAIWAQSTDGVIGDGNDMPWHVPEDLAYFKATTLGEPVIMGRTTWTTIPERFRPLPGRRNFVLSSRAPGAWSTGAEVVTAIPELDCDAWIMGGGAVYTSTLPLVDEVVITLIDVTLAPVLGDAAVYAPALDDSFEVVEESPWQQSASGTVLGTPARYKFQRLRRR

SEQ ID NO: 1593 - protein, 152 aa, Artificial Sequence
  Description of Artificial Sequence:  Synthetic peptide
MIGAIWAQGRDGIIGDGTDMPWHIPEDLKHFKKTTMGQPVIMGRRTWESLPFKPLPGRENFILSSREPGDWSAGGTVVTEIPKSGWIMGGGEVYKATVGSADVLEITLIDATFDVSTPVYAPEIPANFNLDDESEWFTSGEYRYKFQRYIKV

SEQ ID NO: 1594 - protein, 162 aa, Artificial Sequence
  Description of Artificial Sequence:  Synthetic peptide
MIVFVYARDAHYGIGKDNGLPWHLPADLRHFKRTTTGQTIVMGRKTFDSMGGPLPNRKNVVLTRSRSFQAEGAEVIHSLDDVLQLSKQEAIYVIGGAEIFALLWDICDKHIVTVIDEKFEADTFVPPLSEQEWELVETVPGPIDEKNRYPHEYRTYVRKQAK

SEQ ID NO: 1595 - protein, 165 aa, Artificial Sequence
  Description of Artificial Sequence:  Synthetic peptide
MKVSLIAAMDKNRVIGKENDIPWRIPKDWEYVKNTTKGHPIILGRKNLESIGRALPDRRNIILTRDKGFTFNGCEIVHSIEDVFELCKNEEEIFIFGGEQIYNLFFPYVEKMYITKIHHEFEGDTFFPEVNYEEWNEVFAQKGIKNDKNPYNYYFHVYERKNLLS

SEQ ID NO: 1596 - protein, 160 aa, Artificial Sequence
  Description of Artificial Sequence:  Synthetic peptide
MIIFVWAQDRAGNIGKDNKMPWHLPGDLQFFKKTTTGKTLVMGRKTYESLGKALPNRKTIVLTRDNELQLDDAEILHSRDEVLALAETGEPIYVVGGAEIYRLFMDVADKLIVTKIDAEFDADTAFPEVDWENFSEVAKEPHEKDEKNKYNYTFYTYERN

SEQ ID NO: 1597 - protein, 121 aa, Artificial Sequence
  Description of Artificial Sequence:  Synthetic peptide
MKVSLIAAMDKNRVIGKENDIPWRIPKDWEYVKNTTKGHPIILGRKNLESIGRALPDRRNIILTRDKGFTFNGCEIVHSIEDVFELCKNEEEIFIFGGEQIYNLFFPYVEKMYITKIHHEF

SEQ ID NO: 1598 - protein, 166 aa, Artificial Sequence
  Description of Artificial Sequence:  Synthetic peptide
MWSFLKISLIVAMDKKRVIGKDNDIPWRISSDWEYVKNTTKGHAIILGRKNLQSIGRALPDRRNIILTRDKNFNFKDCEIAHSIEAAFKLCENEEEVFIFGGEQIYVMFLPYVEKMYVTKIHHEFEGDTFFPVVNFDDWKEVSVEKGIKDEKNPYDYYFHIYERIR

SEQ ID NO: 1599 - protein, 161 aa, Artificial Sequence
  Description of Artificial Sequence:  Synthetic peptide
MTLSIIVAHDKQRVIGYQNQIPWHLPNDLKHVKQLTTGNTLVMGRKTFNSIGKPLPNRRNVVLTNQASFHHEGVDVINSLDEIKELSGHVFIFGGQTLYEAMIDQVDDMYITVIDGKFQGDTFFPPYTFENWEVESSVEGQLDEKNTIPRTFLHLVRRKGK

SEQ ID NO: 1600 - protein, 161 aa, Artificial Sequence
  Description of Artificial Sequence:  Synthetic peptide
MIRSIIVAQSENRAIGINNTLPWHLPADLKRFKAITMGHHMIMGRKTYESIGNPLPGRTSIVVTRNKDLVFAGCTMAHSLAEAFEIAQNNNDSEAFVIGGAELIKEAINSCDKLYLTTIHQNFEGDTFLDALASDWKETEHVVHAPDDKNAYSYSFITYEK

SEQ ID NO: 1601 - protein, 163 aa, Artificial Sequence
  Description of Artificial Sequence:  Synthetic peptide
MSLISLIAAIDETGGLGINNQLLCYLPADLQHFKSITMGKPIIMGRKTYESIGKPLPGRLNIVISQSIQSIPGVVVVDSLGRAIKETADASEVMIIGGAKIYSQAISMANRLYITRIHHQFTADVFFPKINELAWCCRSKEYRQHDDKNQYDMTFCVYERISI

SEQ ID NO: 1602 - protein, 183 aa, Artificial Sequence
  Description of Artificial Sequence:  Synthetic peptide
MLRFNLIVAVSENFGIGLKGDLPWRLKSELKYFSRTTKRTSDPNKRNVVIMGRKTYFGVPASKRPLPERLNIVLSTTLKPAELPSDVVLCHSLEEAMKHLEEETLRDQIENVWIVGGSGVYEEAMASSRCNRLYITKIQQNFECDTFFPSIPDSFREVPPDADTPVGVQEENGIKYEYKVLEK

SEQ ID NO: 1603 - protein, 177 aa, Artificial Sequence
  Description of Artificial Sequence:  Synthetic peptide
MTPRLSVLVAMARNRAIGHKNAIPWHLPHDLKHFKELTMGHPMIMGRKTYESIGRLLPGRTSIIITRQPDYEVPGALVVSSIGEALSACKQIRSGEEGHPDQGNECFVIGGADIFQQMLPLCDRLYMTEIHRDFEGDTYFPEFDRNDWWEVSREEHVDDSGLEYHFVTLDRMASQQE

SEQ ID NO: 1604 - protein, 188 aa, Artificial Sequence
  Description of Artificial Sequence:  Synthetic peptide
MLKFSLIVAVCENFGIGIKGDLPWLLKSELKYFSTTTKRVHDPSKRNVVIMGRKTYFGVPESKRPLQQRLNIVLSTTLKQSDLPKDVLLYPNLESAMSFLENEKDINQQIETVWIVGGSGVYKEAMASPRCHRLYLTKIYAKFDCDTFFPDIPADFKEVDLDPETPKGIQEENNITYEYKILEKQDHK

SEQ ID NO: 1605 - protein, 182 aa, Artificial Sequence
  Description of Artificial Sequence:  Synthetic peptide
MLRFNLIVAVCENFGIGIRGDLPWRIKSELKYFSRTTKRTSDPTKQNAVVMGRKTYFGVPESKRPLPDRLNIVLSTTLQESDLPKGVLLCPNLETAMKILEEQNEVENIWIVGGSGVYEEAMASPRCHRLYITKIMQKFDCDTFFPAIPDSFREVAPDSDMPLGVQEENGIKFEYKILEKHS

SEQ ID NO: 1606 - protein, 174 aa, Artificial Sequence
  Description of Artificial Sequence:  Synthetic peptide
MTIPSLSPPRLAILAAVSANRVIGLNNTLPWHLPADLKHFKQLTTGQIVVMGRRTFDSIGRPLPDRTNVVLTRQRHFNQPGILTAGSIQEVLEHFCGDDRQIFIIGGAEIYQQTLPFCQRLYLTEIQQDFAGDTFFPEYDRDNWREISREMHQATDSGIEYHFVVLDRKQPVNA

SEQ ID NO: 1607 - protein, 159 aa, Artificial Sequence
  Description of Artificial Sequence:  Synthetic peptide
MTLSILVAHDLQRVIGFENQLPWHLPNDLKHVKKLSTGHTLVMGRKTFESIGKPLPNRRNVVLTSDTSFNVVGVDVIHSIEDIYQLPGHVFIFGGQILFEEMIDKVDDMYITVIEGKFRGDTFFPPYTFEDWEVASSVEGKLDEKNTIPHTFLHLIRKK

SEQ ID NO: 1608 - protein, 185 aa, Artificial Sequence
  Description of Artificial Sequence:  Synthetic peptide
MSKKFSCIVAVCENRGIGINGDLPWKLKQELKYFSHTTKKVNDADKRNAVIMGRKTYFGVPESKRPLPERLNIVLTRNAAAYTFPPDVLVCGSLQEALHKLDSTDHGEHIENIWVVGGNSVYKEAMESDRCHRIYLTEIKKQFDCDAFFPEIPNSFMVIDNDPDTPSGVQEENGIQYVYKIYENK

SEQ ID NO: 1609 - protein, 186 aa, Artificial Sequence
  Description of Artificial Sequence:  Synthetic peptide
MKKFSLIVAVCANGGIGIKGDLPWRLRQELKYFSRMTKKIQDSGKRNAIIMGRKTYFGVPESKRPLPERLNIILTRDPSANAYPSEVMVCTSMQEALKKLDEAPLVNEIENVWIVGGNAVYKEAMQSDRCHRIYLTEIKETFECDAFFPEITSDFQLVKNDDDVPEDIQEENGIQYQYRIYEKVPK

SEQ ID NO: 1610 - protein, 159 aa, Artificial Sequence
  Description of Artificial Sequence:  Synthetic peptide
MTLSILVAHDEQRVIGYNNDLPWHLPNDLKHVKKLSTGNTLVMGRRTFESIGKPLPNRRNVVLTSDTTFNVDGVDVIHSIDDIYKLEGHIFIFGGQSLFEEMIDKVDDMYITVVNGKHQGDTFFPPYTFEEWEVESSVDGELDEKNTIPHTFLHLVRKH

SEQ ID NO: 1611 - protein, 175 aa, Artificial Sequence
  Description of Artificial Sequence:  Synthetic peptide
MTILQPATSRLAILAAISANRVIGLNNSLPWHLPADLKHFKQLTTGHIVVMGRRTFDSIGKPLPDRTNVVLSRQHVLDVPGIITAHSIQEVLDHFANDDRQIFVIGGAELYRQTLPLCQRLYLTEIQEDFEGDTFFPEYDHDDWQEISREIHHETGGSGLEYHFVMLDHKLPDSG

SEQ ID NO: 1612 - protein, 161 aa, Artificial Sequence
  Description of Artificial Sequence:  Synthetic peptide
MTLSILVAHDQQRVIGVNNQLPWHLPSDLKHVKSLTTGNTLVMGRATFESIGKPLPNRRNVVLTRNKSFKPEGVDVIHSFEEIYDLPGHVFIFGGQSLFEEMIDKVDDMYITVIEDKYNGDTFFPPYTFKDWEVASSNKGVLDEKNTIPHTFLHLIRKGTS

SEQ ID NO: 1613 - protein, 178 aa, Artificial Sequence
  Description of Artificial Sequence:  Synthetic peptide
MNLHLIAATCEGMGIGIKGTLPWKLKSELAFFTYMTTNTKNPNKRNVVLMGRRTWESIPKENRPLKNRINIVLTSQSLDYGNDVIVCKNIPHAFEVIEKIKDRIENIWVTGGSSVYKEAMESPNFYRLYLTRIKKYFECDTFFPTIPNDFVLTEDPNIPQGIQEENDIQFVYEVYKKE

SEQ ID NO: 1614 - protein, 162 aa, Artificial Sequence
  Description of Artificial Sequence:  Synthetic peptide
MDISLIWAQSKNKVIGHDQYIPWNLPEDISWFKKNTINKPVIMGRKTFESIKKPLENRINIVLSKNLYRNVMSNLKIAKNPKQALFFAKNYNEVMIIGGKQIYKIFLPKATKLYLTVINAEINGNIFFPRYNRKKWILSFEKYFNSDTKNKYSMYFRIFNKI

SEQ ID NO: 1615 - protein, 161 aa, Artificial Sequence
  Description of Artificial Sequence:  Synthetic peptide
MKIILIAALDKGRVIGSEGSIPWNIQEDLNYFKEKTTNKAIIMGRKTFESIGRPLPNRLNIVMTRSKEQIDDVIIAPNREVAIEQGRGFSSEIFVIGGEYIYKEFLEMASEMLLTEIDLDTEGDTYFPKWEESEWLEVSREAKKDDSQKINYEFVRYKRKN

SEQ ID NO: 1616 - protein, 168 aa, Artificial Sequence
  Description of Artificial Sequence:  Synthetic peptide
MKPEVVLVVAVAANGVIGMTGGLPWHLPQDLSRVKAITMGKPLIMGRKTYESIGRPLPGRKTIVITRAKISFPPEVKVVKSFGCAVRYAEEYANDMGVDEIVAFGGARVYESAIPIAKKIYKTEVDLHPDGDTFFPEYKRDEWREVARTDFAAQNNSFAYSYVQLDRI

SEQ ID NO: 1617 - protein, 167 aa, Artificial Sequence
  Description of Artificial Sequence:  Synthetic peptide
MIISLIAAIDKNGVIGADGDLPWNIPSDLKKFKEITSYKPIIMGRKTWDSIGRPLPNRDNIVISRNKNLNLEGAILTSSPEEAITIAKQRAKENGADEIMIIGGGYIYNEFITVSDRLYITEVDIEVEGDAFFPKIDSSKFKEVKREEKSKEPEDDAYHSMVIYEKI

SEQ ID NO: 1618 - protein, 155 aa, Artificial Sequence
  Description of Artificial Sequence:  Synthetic peptide
MGRNRAIGREGRLPWRLPAEMRHFRRTTMGKAVVMGRRTYESIGGPLKGRTNIVLTRDPGFRAPGCEVRHSVAELLQDRRPLYVIGGAEVYRQFLPHADEMILTRIDHDFEGDAFFPAWSEDEWELVGSTPHPRDEENPYDFVVEHYRRRRIPAG

SEQ ID NO: 1619 - protein, 159 aa, Artificial Sequence
  Description of Artificial Sequence:  Synthetic peptide
MLTLVVARAKGGAIGKDGTIPWHAPEDLAFFQRETLGGALIMGRRTWESLPKRPLPRRLNIVVTSRPLEGEALFTSFDAAIPAARAAGHARIYSIGGARIFSAHLPIADRLLVTEVDLEVEGADTFFPEFDPSEWVCAARIELRAASPACVLYEYLRRR

SEQ ID NO: 1620 - protein, 165 aa, Artificial Sequence
  Description of Artificial Sequence:  Synthetic peptide
MHISLVAAFSADYVLGNKGKIPWNLKEDLDNFKNLTIGSAVIMGRKTYESIGHPLSNRLNVVMTRKPKGLRGIVEVKTKQKAIEVASNFSENIYVIGGEDIYMEFIKLASTMYLTKINIEVEGDTFFPNWDKAEWEEVSRIDSKDPTQNIEYSFFHYSRISLRRP

SEQ ID NO: 1621 - protein, 159 aa, Artificial Sequence
  Description of Artificial Sequence:  Synthetic peptide
MEIFLIAAVDKNLAIGKNGRIPWHIKEDLQYFQKNTLNTAMIMGRSTFDSIGKALPNRQNIVMTKSPTNREGVIEVLDAASAIKEAKKTSNKISIIGGESIYKEFLPLANKLLITEINITVEGADTFFPAWEKQEWAENSRINSIENGIEYSFVEYLRD

SEQ ID NO: 1622 - protein, 159 aa, Artificial Sequence
  Description of Artificial Sequence:  Synthetic peptide
MEIILIAAVDKNLAIGKDGKIPWEIKEDLKFFREKTEDTAIIMGRATYDSIGRPLPKRKNIVMTRTFKKREGIVEVNSSKDALKHAKSYSEKINIIGGEYIYKEFLPLATKLLITEIDIEVISPDAFFPEWDRSQWKEISRKRSSENRLNFSFVEYQRY

SEQ ID NO: 1623 - protein, 159 aa, Artificial Sequence
  Description of Artificial Sequence:  Synthetic peptide
MEIFLIAAVDKNLAIGKNGKIPWHIKEDLRHFKKNTLNTTIIMGRATFDSIGKPLPDRNNIVMTKSPSNRKGVIEVADAKSALKEAKKASEKISIIGGESIYKEFMPIANKLLLTEIDIVVKEADTFFPIWKKEDWTERSRIKSIENGIKYSFVEYIKN

SEQ ID NO: 1624 - protein, 161 aa, Artificial Sequence
  Description of Artificial Sequence:  Synthetic peptide
MKIILIAALDKGRVIGSEGSIPWNIQEDLNYFKEKTTNKAIIMGRKTYESIGRPLPNRLNIVMTRSIEEIKGVKIALDKEKALEEAKRFSSEIFIIGGEFIYKEFMELASVMLLTEIDLKTKGDAFFPKWNKSEWKETSRHSRIDVLENISYDFVRYERKN

SEQ ID NO: 1625 - protein, 163 aa, Artificial Sequence
  Description of Artificial Sequence:  Synthetic peptide
MITLIVARARNGAIGKDNDIPWHAPEDLKAFQRETLGGAIIMGRNTWDSLPFKPLKNRFNIVVSSNPDAADTVVASLDEAIDLARSEGYARLYGIGGAGIYKGMLARADRLMITEVDLEIDDADAFFPEFPPEEWRVNATLPLRAEDPACVLTEYLRLPRAQG

SEQ ID NO: 1626 - protein, 159 aa, Artificial Sequence
  Description of Artificial Sequence:  Synthetic peptide
MLTLVVARARGGAIGRDGTIPWAAPEDLAFFQRETLGGAVIMGRRTWESLPKRPLPRRMNIVVTSQPLEGDALFTSFEAAIPAAEAAGHARIYSIGGARVFSEHLPLADRLLVTEVDLEVPDADTFFPAFDPKDWNLATRIALRSEAPACVLYEYLRRR

SEQ ID NO: 1627 - protein, 178 aa, Artificial Sequence
  Description of Artificial Sequence:  Synthetic peptide
MQTSRNKAQAGHHGAGDGMITLVVARDRNGAIGKDGGIPWHLPGDLKMFQRETTGGALIMGRHTWESLPAKPLNRRLNIVVTSRPDTAKLICETVGEAVRLAEAEGYFRIYGIGGAGIYRDMLPLADRLLVTEVETAVENADTFFPEFDEEEWQETTRATAAGDPGYAVRELIRKRGG

SEQ ID NO: 1628 - protein, 159 aa, Artificial Sequence
  Description of Artificial Sequence:  Synthetic peptide
MLTLVVARAKGGAIGRDGDIPWHAPEDLKMFQRETLGGALVMGRRTWESLPVKPLKNRLNIVVSRDTALTDHVVGSVEEAIGLARSEGYTRIYGIGGAGIYRALLPLADRIMVTEVDRDVPDADAFFPDFDEAEWYPLREARLRDADPACVLRDLVRRR

SEQ ID NO: 1629 - protein, 162 aa, Artificial Sequence
  Description of Artificial Sequence:  Synthetic peptide
MITLIVARDRNGAIGKDNTIPWHAPEDLKAFQRETLGGAIIMGRNTWDSLPFKPLKNRLNLVVSSNSEAADEVHGSVAAAVDAAYGQGYRRIYGIGGAGIYREMMQIADRLLITEVDMVVEGADTFFPEVTLSDWQRNGETQLRVADPACTMVEFLRIPAHP

SEQ ID NO: 1630 - protein, 190 aa, Artificial Sequence
  Description of Artificial Sequence:  Synthetic peptide
MDPTLYCVVAVDTKLGIGKNRCLPWPALRGDMRRFRQLTTDCAPGKQNMVVMGRRTWLSIPAGCRPLAGRINVVLSRTLETPPPGAHFLASSLDAALGLARSPELAQQIDKVWVIGGGDLYREALTGPWPVRLFLTRVLHDFACDVFLSHDSLAAYARVNPKPGEQERVFQERGIFYMFETYIKVTQSSD

SEQ ID NO: 1631 - protein, 164 aa, Artificial Sequence
  Description of Artificial Sequence:  Synthetic peptide
MLAAIWAQDEQGVIGKEGKLPWHLPNDLKFFKEKTIHNTLVLGRATFEGMGCRPLPNRTTIVLTSNPDYQAEGVLVMHSVEEILAYADKYEGVTVIGGGSVVFKELIPACDVLYRTMIHETFEGDTFFPEIDWSVWEKVATVPGVVDEKNLYAHDYETYHRNDK

SEQ ID NO: 1632 - protein, 167 aa, Artificial Sequence
  Description of Artificial Sequence:  Synthetic peptide
MRLAVICAMSRNGVIGKDNGLPWSLPGDLKHFKETTLGCPIIMGRKTWDSIGRPLPGRTNIIVTRRGEVGSDGIKITDSFESALDLAKSCLATARGNEIFVIGGAQIYKEAFPLANRLYLTRVNSFVDGDTYLEGFDEADWIEISNKSFTALSSEGHDYNICVLDRR

SEQ ID NO: 1633 - protein, 145 aa, Artificial Sequence
  Description of Artificial Sequence:  Synthetic peptide
MRFISIIVAKSHNNVIGSEGNLPWHIPEDLKKFKSITMGKPMIMGRSTFESIGQALPGRKNIVMTRDIDYQADGISIAHTLEDALTLCEQAKEIMIIGGGEIYKLFFDIVNRLYLTNVEKYIDGDVFFPEIDLSKWNVIKKEEFP

SEQ ID NO: 1634 - protein, 167 aa, Artificial Sequence
  Description of Artificial Sequence:  Synthetic peptide
MIISILVAMNEELLIGVNNDLPWKLQDDLEHFKNYSLNKPIIMGRKTFESIGRPLPNRKNIVVSSSMKEQDGIKVFNNLNDAIAFSKKYNEENDIDEIILIGGAKVFAEGLKQTTKLVISWVDANSIKGDVYFPEFNKQEWREVDSKKFLKSEKNQYDFEIKEYLRK

SEQ ID NO: 1635 - protein, 162 aa, Artificial Sequence
  Description of Artificial Sequence:  Synthetic peptide
MNNLSIIVAYSKNRAIGKNNQLPWKLSEDLKNFKKITMGNSIIMGRKTFESIGFILKGRQNIVISKTSKFQGVTMSSSITDSINKAKKSKEIFFIGGQDIFEQTISLVDKIYLTRINEEIDGDRFFPEFDFNQWEVIEKKEFSKNEFNSHSFSFDVLKRLNT

SEQ ID NO: 1636 - protein, 166 aa, Artificial Sequence
  Description of Artificial Sequence:  Synthetic peptide
MSRISIIAAVDSRMAIGFQNKLLFWLPNDLKRFKALTTGNTIIMGRKTFESLPKGALPNRRNVVLSSNPAAECPGAEVFTSLEAALESCQAEEKVYIIGGASVYRQAISLADELCLTEVNDTAPEADAFFPAVDTTIWHEKSREVHPADEKHLCSYAFVDYVRGID

SEQ ID NO: 1637 - protein, 180 aa, Artificial Sequence
  Description of Artificial Sequence:  Synthetic peptide
MLKYIILTKNRFLKMISLIVAYDKNFGIGKENTLAWKLSEDLKNFKKITENNYIVMGRKTFESIGRPLPNRKNIILTRDKDYKQDKCLIINSTQDILNFAESKPHYEIFIIGGAQIYKEFLKYADRLYITEVDAEMTDLDAFFPQWDKSKYKRIGHKQFKKDDKNEFDFTFSVFEKNKNL

SEQ ID NO: 1638 - protein, 185 aa, Artificial Sequence
  Description of Artificial Sequence:  Synthetic peptide
MSQVKLNLIAAACDNMGIGVNGALPWRLKKEMAYFTTMTSKVSEPTKVNAVIMGRRTWDCIPDKYRPLQDRVNIVLTHNVDSVKENVPEGVMVFPGLDEAIKYIEGREDIESTWVIGGSSIYRAAMTHPNCGKIYLTEIQKSFDCDTFFPNIDKQQFHLVDEEQIPGEKQVEGNISYYFRVYKKL

SEQ ID NO: 1639 - protein, 180 aa, Artificial Sequence
  Description of Artificial Sequence:  Synthetic peptide
MSSQAALCGTVPSRQDIVAIAAQTENRVIGRDGGMPWHLPADFAHFRALSVGKPNIMGRKVFDTLRRKPLPERVNIVLTRNENLKFDGCLIAHSPEEALQLAGDAPEIAIIGGEEIYRLYWDRLTRLEMTLIHAELDGDTFFPEIGPEWELAQETFRPADEKNRYDLTFQTWRRRGSGQP

SEQ ID NO: 1640 - protein, 165 aa, Artificial Sequence
  Description of Artificial Sequence:  Synthetic peptide
MKLVLIAAVAENGVIGTDGEMPWHYPEDLKRFKETTMGHPVIMGRTTYESITGQLGGPLPGRTNIVLSSRESLPIPEEVVHARDIEAALSAAEDALDADKQTVYVAGGATVYEQCLDRADELRITEVPESPDGDTYFPAIGDEWTATEREAGDEVAFVRYERAGD

SEQ ID NO: 1641 - protein, 164 aa, Artificial Sequence
  Description of Artificial Sequence:  Synthetic peptide
MSKISIIAAVDRRMAIGFQNKLLFWLPNDLKRFKALTTGNTIIMGRKTFESLPKGALPNRRNVVLSTRPDTVCPGAEVFPSLEVALQSCKEDEHVYIIGGASVYQQALPLADELCLTEINDVAPEADAFFPEVSPAQWHEKSREAHPVDEKHLCPYAFVDYVKQ

SEQ ID NO: 1642 - protein, 162 aa, Artificial Sequence
  Description of Artificial Sequence:  Synthetic peptide
MISIVVAIAENGAIGYKNDLLWHLPADLKRFKEMTTGHSIIMGSRTFRSLPKGALPNRRNIVLSRMQQDFPGAEWAASPEVALELVGEEAEAFVIGGAQVYEQMLPYTDKIYLTRVHADFPEADTFFPELDMSEWVELSRTEYPADEKNRYATTLLELIRDY

SEQ ID NO: 1643 - protein, 169 aa, Artificial Sequence
  Description of Artificial Sequence:  Synthetic peptide
MKKIISHVVALSNNNVIGVDNMLPWNLKRDLQHFKNYTTNKILLMGRKTYESIGRPLPNRINYVISTTIDEIDGAEVFKSIDEAIDAANKKCDDHNEYNEIVIIGGGYLFRDTLKITNKLVLTNVNCEIEGDVFYPDIDFNEWQEKSSENFSKDIDNDYDFKVRVLERV

SEQ ID NO: 1644 - protein, 145 aa, Artificial Sequence
  Description of Artificial Sequence:  Synthetic peptide
MKTISHLVAVSNDLVIGVDNDLPWNLKDDLAHFKKYTLNKIIIMGRKTYESIGRPLPNRINYVISRTLKKIDGAYVFNNLENAMNSAEKHNKKENQNNEIIIIGGGYLFKQTSSSVNKLVITRVDCNVKGDIYYPKIDMSNWKKF

SEQ ID NO: 1645 - protein, 168 aa, Artificial Sequence
  Description of Artificial Sequence:  Synthetic peptide
MKIISHVVALSNNNVIGVDNDLPWNLKRDLLHFKEYTTNKIIIMGRKTYESIGRPLPNRINYVVSRTIDKIEGAFVFDSIDDAICDAKAYCIELNLEEIVIIGGGFLFRDTLSITNKLVLTRVDCNVEGDVFYPDINLKEWDEISSENFTKNSENEYDFAVVTYKRIT

SEQ ID NO: 1646 - protein, 167 aa, Artificial Sequence
  Description of Artificial Sequence:  Synthetic peptide
MIISAVVAMNSSLLIGKDNDLPWKLKDDLEHFKTYTLGKPIIMGRKTYESIGRPLPDRLNVVVSRTINEIDNLITVTSLKKAINEARIYCESHGQNEIVLIGGAGIFKEGLKILNKLVITWVDADDLEGDVYFPSFNINEWKEIDSKDFSRSADNQFDFTVKEYLKL

SEQ ID NO: 1647 - protein, 167 aa, Artificial Sequence
  Description of Artificial Sequence:  Synthetic peptide
MIISHVVALSNNNVIGVDNNLPWNLKTDLSHFKKYTTNKVIVMGRKTYESIGRPLPNRINYVVSKTIDQIEGAHVFTSTESAINNAKDYCIKNSLNEIVVIGGGFLFRDTLSVTNKLVLTRVDCDIDGDVFYPEIDLSNWLEKDSISFSKDADNDYDFIVSTYEKVK

SEQ ID NO: 1648 - protein, 169 aa, Artificial Sequence
  Description of Artificial Sequence:  Synthetic peptide
MNIIISHVVALSNNNVIGVDNNLPWNLKTDLNHFKNYTTNKIIVMGRKTFESIGRPLPNRLNFVVSRTIDEIENAFVFKSTKEAIDAAKKKCLDDGNYNEIVIIGGGYLFKDTLEITNKLVLTNVDCDINGDVYYPDIDFKFWKEKSSENFSRNEDNDYNFTVKVYEKI

SEQ ID NO: 1649 - protein, 168 aa, Artificial Sequence
  Description of Artificial Sequence:  Synthetic peptide
MSVISHLVAMAKNRVIGVDNDLPWSLPDDLNHFKQYTLNKPIVMGRKTFESIGKPLPQRINIVISRSLSEIEGVNVFSEVEDGISFANQYNEEHQLEDEVIIIGGAQIFNETLPIMNRLVLTQVDCEIAGDVFYPEIDMNNFIRKNVSKHFKDEKNQFDFSIDLYEKI

SEQ ID NO: 1650 - protein, 168 aa, Artificial Sequence
  Description of Artificial Sequence:  Synthetic peptide
MVTISHVVALSNNNVIGVNNSLPWNLKTDLAHFKNYTSNKIIVMGRKTYESIGRPLPNRINLIVSNTIKEVNGAELFKSTENAINKAKELCINKNLDEIIIIGGGYLFRDTLSITNKLVLTKVDCNIEGDVFYPDIDLNEWEKLSSEHFKKDSDNDYDFTVITYEKST

SEQ ID NO: 1651 - protein, 167 aa, Artificial Sequence
  Description of Artificial Sequence:  Synthetic peptide
MCMKLSLIAAVAANGVIGAGGDIPWQYPEDLTHFKETTVGHPVIMGRRTFESIRRDLDGPLPERLNIVLTTTPHQLPDSVTAVTSTTAAVAEAADSDASTTYVIGGATVYEQFLPQADELILTELAAAFDGDTVFPTVDWSNWTEMERTTHSEFAIVRYTRTSSDSA

SEQ ID NO: 1652 - protein, 185 aa, Artificial Sequence
  Description of Artificial Sequence:  Synthetic peptide
MSGEELSGSETEGDAAVRFVLVAAVADNRVIGRDGTMPWHLPEDLKQFKRTTTGHPVVMGRKTYESIARQLGGPLPERHSVLLTTRDLDLPEGAEAVESVESAVAAAEDAADEMGVETVYVVGGATVYEQFLGRAAGLVLTELDAAHEGDTRFPEWDRGKWVETDRDDRDGFSFVTYERKQPAAA

SEQ ID NO: 1653 - protein, 167 aa, Artificial Sequence
  Description of Artificial Sequence:  Synthetic peptide
MLAAIWAQDENGLIGKEDRLPWRLPNDLKFFKQMTEANTLVMGRKTFEGMGSRPLPNRQTIVLTRDSSYKAEGVHVMHSVEDVLALEKETDGIFFIAGGSAVYQEFLPFCTILYRTVIHHVFDGDAYFPPVDWSDWSLINTSQGEMDEKNRYPHQFETYQRNENPVK

SEQ ID NO: 1654 - protein, 186 aa, Artificial Sequence
  Description of Artificial Sequence:  Synthetic peptide
MAFSSASLPTFDLAAALMPELVIIAAVAEDNRVIGQDKDLPWHIPEDLKRFKQLTTGHPLLMGRRTFESIVHQFGGPLPDRKMVVLTTQDDYEAYPEVDTYASVDAALAALPDDATVFIGGGESVYEQFLPHADRLELTLVEGAYEGDTFFPPFEHLIGDVFEETAVDARDGFRFVTYERKNVDVD

SEQ ID NO: 1655 - protein, 168 aa, Artificial Sequence
  Description of Artificial Sequence:  Synthetic peptide
MKTIISHVVALSNNRVIGKDNDLPWNLKTDLKHFKEYTTNKILIMGRKTFESIGRPLPNRTNIIVSKTIESIEGAEVFSDLNSALNKAKESCETLDKNEIVIIGGGFLFNDTLDIVNKLVLTRVDCEIDGDIFYPEINLMNWNKISSEEYLKDNENEFDFVVEVFTKN

SEQ ID NO: 1656 - protein, 168 aa, Artificial Sequence
  Description of Artificial Sequence:  Synthetic peptide
MIISHVVAMSNNNVIGVDNDLPWNLKKDLEHFKKYTLNKVIVMGRRTYDSIGRPLPNRQNYIVSNTLKHIPNAQVFTNIKLAIKAAEEHNLKYDLENEIVIIGGGFLFRDTLDYFNKLILTRVDCEIENGEVFYPEFDLKNWKKTQSESYLKDADNDFDFKVEEYVKL

SEQ ID NO: 1657 - protein, 120 aa, Artificial Sequence
  Description of Artificial Sequence:  Synthetic peptide
MIISHVVALSNNNVIGVDNNLPWNLKTDLSHFKEYTTNKVIVMGRKTYESIGRPLPNRVNYVVSRTIDKIDGAYVFNSIESAIKNAKDYCNKNGLNEVVIIGGGFLFRDTLSITNKLVLT

SEQ ID NO: 1658 - protein, 168 aa, Artificial Sequence
  Description of Artificial Sequence:  Synthetic peptide
MIIISHVVALSNNRVIGVNNDLPWSLKKDLAHFKAYTTNKIIIMGRKTFESIGRPLPNRINFVVSTTITEIEGAKVFKSTEEALSEANKLCIELNYEEIVIIGGGYLFRDTLSIVNKLVLTEVDCEINGDVYYPDIDLDSWQNTETSEHKKDSENEFDFKVLVYEKIK

SEQ ID NO: 1659 - protein, 167 aa, Artificial Sequence
  Description of Artificial Sequence:  Synthetic peptide
MIISHLVALSNNFVIGVNNDLPWKLKKDLQHFSAYTQNKAIVMGRKTFESIGRPLPNRKNIVISSTLNAQDGIEIVPTLDQGIELASQWNKNTTGSKEVVLIGGGYVFEESKNIVNKLVLTRVKCEIEGDVFYPQIDLSNWEKVSTESFKRDDENEYEFSVETFIKN

SEQ ID NO: 1660 - protein, 128 aa, Artificial Sequence
  Description of Artificial Sequence:  Synthetic peptide
MSKITISAIVASAKNRVIGDGEQLFWKISEDFRRLKEITMGCPLIMGRKTWDSIGKPLPGRASIVLTRNPKWHKNGAIKASSIEEGITIGTNWLKNNGSLKKEIFIFGGMDIYNLGLVYCDYIYLTEV

SEQ ID NO: 1661 - protein, 174 aa, Artificial Sequence
  Description of Artificial Sequence:  Synthetic peptide
MPNITISAIVASAKNRVIGDGEQLFWKISEDFRRLKEITMGCPLIMGRKTWDSIGKPLPGRASIVLTRNSKWQENGAIKVSSIEEGINIGKNWLNNNGRLKKEIFIFGGMDIYNLGLVYCDYIYLTEVDIYPESKYVFPIIDPIKWKLIFQSKIKKSNEGIKYKFLTYKKITQK

SEQ ID NO: 1662 - protein, 163 aa, Artificial Sequence
  Description of Artificial Sequence:  Synthetic peptide
MIALIWAEDQNGLIGNQGQLPWHLPADMQRFKALTTGHHVVMGRKTFAGFKRPLPRRTNWVLSRQSDLKLPPEVHQLADVAAIQTLAAAHPDEPIFVIGGAVVFEAVLPVADYLYRTRINARFDGDTWMPAVDYTQWQLVSQQIGTVDEKNQYPYEFDDFRRR

SEQ ID NO: 1663 - protein, 161 aa, Artificial Sequence
  Description of Artificial Sequence:  Synthetic peptide
MVRIYLVAAMGANRVIGNGPDIPWKIPGEQKIFRRLTEGKVVVMGRKTFESIGKPLPNRRTVVLSRQASYSAAGCAVVSTLSQAIAIAAEHGKELYVAGGAEVYALALPRADGVFLSEVHQTFEGDAFFPVLDEAEFEVVSAETVQATITYTHSVYARRNG

SEQ ID NO: 1664 - protein, 169 aa, Artificial Sequence
  Description of Artificial Sequence:  Synthetic peptide
MITSIWAQSKNNVIGRNNHLPWSLPDDLKFFRQETKNKAVVMGRKTYESFGSKALPKRLNIILTSNMDFKSNDPEVKIVHSPIEAVNTAKEQHLPLYVIGGASVYESFMNMADRLLITLVDANIKGDTFAPNFSEKSFSLVSQCHHAQDKKHAYSFDFLTYERKNKSDQ

SEQ ID NO: 1665 - protein, 162 aa, Artificial Sequence
  Description of Artificial Sequence:  Synthetic peptide
MLSYVWAEDEKGAIGYQGRLPWHLPADLAHFKAKTMGHPMLMGRKTFESLPGLLPGRQHVVLSTRKLDLPAGVLQLKSEEEVSAWLKEQAGEVCVIGGSSLFALLADQVDKLEVTRIKGIFSADTYMPNLDWAAFALVKSEAHRADGKNKYDYVFETYLRKK

SEQ ID NO: 1666 - protein, 166 aa, Artificial Sequence
  Description of Artificial Sequence:  Synthetic peptide
MIAFLWAEDQNGLIGQDGHLPWRLPNDLANFKRETINEAVIMGRKTYDSLPKKPLPGRQNIVITRQSGLTVAKDVLVFNERTQLLDYQKEHPMQKLFIIGGADIFKLFAADVDYLYVTKIAEKFKGDVYMPTIDYTQFKLISQKAGAVDERNQYPHTFEIYQRITK

SEQ ID NO: 1667 - protein, 163 aa, Artificial Sequence
  Description of Artificial Sequence:  Synthetic peptide
MISIIVAIAKDNVIGKDNKLLWHISEDLKRFKKITTGKKMIMGRKTFESLPGILPNREHIVLTRDNNFNVDSDKVTIEHDFNSVLQRYSECEDEVFVIGGAEIYKQFLPYAKKLYLTKVDEEFEGDTYFPGINYSNYNTEYTSEKFIDEKNGLHYTFVNLIQA

SEQ ID NO: 1668 - protein, 160 aa, Artificial Sequence
  Description of Artificial Sequence:  Synthetic peptide
MITMIAAAAENNALGKNGDIPWHLPDDFRHFKKLTTGHHIIMGRKTWESFPKPLPNRTHVVITRDKQYNAPGATVVHSLEDALAYCKQEAHTFIIGGGEIYKLGMPYATHIELTRVHNEYAADAFFPEIPESEWELVNSTFHDVDDKHKSGFTFQSWKRK

SEQ ID NO: 1669 - protein, 164 aa, Artificial Sequence
  Description of Artificial Sequence:  Synthetic peptide
MITIIAAIAKNNALGKNNDLIWHLPADLKRFKKVTTGHHILMGRNTFESIGRPLPNRITIIITKNEEYVQEGCLIANSVEQALEMAHDDDQIFIIGGAQVYEYAMKHDFADALDITLVHHEFEADVYFPEIDPTVWRRVEREDFIADEKNKFDYSFIRYKKIAN

SEQ ID NO: 1670 - protein, 153 aa, Artificial Sequence
  Description of Artificial Sequence:  Synthetic peptide
MLSIIAALNENYVIGNENKLIWHISDDLKRFKKLTTGKTIIMGRKTFESLPGVLPNRKHIVITKNLNYSRENVSIVHSIDEIIELKDTTEENFIIGGGEIYRALIPYCSILYLTKVHSNQTGDAFFPKFDENDYSIIATEKHGDYDFVTFKRR

SEQ ID NO: 1671 - protein, 161 aa, Artificial Sequence
  Description of Artificial Sequence:  Synthetic peptide
MFSIIVAKSINNIIGVNNKMPWNIPSDLKRFKELTMGKKILMGRKTFESLPFVLPGRTHLVLTTKKDFSYNHKDIIIYNDLNKLIEEYKDSKEEIFVIGGGKIYSELLKYTSKLYITEVLKEYKGDTYFPKVDYSKWIKTYESSIYEENDNKFKFFNYKKI

SEQ ID NO: 1672 - protein, 171 aa, Artificial Sequence
  Description of Artificial Sequence:  Synthetic peptide
MRMIRFIWAEDEDGHIGYQGTLPWHLPADLKHFKDLTSNHIIVMGRRTFESFPGLLPKRQHIILSTSPTLQRKYQNNAHVKIFSQLKELKNWIKDHSEQTIDIIGGARVFEEFMDEVDMIEKTKIHHVFKGDTLMPKINYEDFELINTKAHQADEKNKFAYDFLEYERKEK

SEQ ID NO: 1673 - protein, 165 aa, Artificial Sequence
  Description of Artificial Sequence:  Synthetic peptide
MNSESVRIYLVAAMGANRVIGNGPNIPWKIPGEQKIFRRLTEGKVVVMGRKTFESIGKPLPNRHTLVISRQANYRATGCVVVSTLSHAIALASELGNELYVAGGAEIYTLALPHAHGVFLSEVHQTFEGDAFFPMLNETEFELVSTETIQAVIPYTHSVYARRNG

SEQ ID NO: 1674 - protein, 167 aa, Artificial Sequence
  Description of Artificial Sequence:  Synthetic peptide
MIRFIWAEDENGCIGYQGALPWHLPADLKHFKELTSNHIIVMGRKTFDSFPGLLPKRKHIILSTNPILQRRYQDNSDVKVFSQIEQLKNWIEDHTEEIIDIIGGAEVFKEFKDEVDVLEKTKIHHIFKCDTWMPELKYEDFKLVNSESHHPNGNNKFDYDFLEYKRI

SEQ ID NO: 1675 - protein, 164 aa, Artificial Sequence
  Description of Artificial Sequence:  Synthetic peptide
MIKSELTIIAAASANNVIGFNNKLIWNIPKDLKRFKELTQGHSVIMGRKTFESLPSPLPNRRNIVVTRNKDYSPGGIQVFSSIEDAIDVCKDDLQPFIIGGGEIYSQTINLVDKIELTRVYKDYQGDAFFPDIPMDKFELDSELVNYLDDDSNTKYSFLTYIKK

SEQ ID NO: 1676 - protein, 164 aa, Artificial Sequence
  Description of Artificial Sequence:  Synthetic peptide
MITIVAAVSENNALGKNNGLIWHLPEDLKRFKKLTNGHCIIMGRKTFDSLPKMHPLPNRHNIVITRNRDFKIDGVTTCNSIEEAIKVSNYDNQPFIIGGGEIYKLSMKYTEKIELTKIYKTFEADTFFPKIDGNKWKLVKEEFHEKNDLNNFDFSYLTYLKINK

SEQ ID NO: 1677 - protein, 162 aa, Artificial Sequence
  Description of Artificial Sequence:  Synthetic peptide
MITIIVAASENNIIGNDNKLIWHLSDDLKRFKNLTKGHHVIMGRKTFESMPRALPNRTNVIITRKKDYIADDAIVTNSLEDALSIASDDPQPFIIGGGEIYKIALDYCDRIELTRVHDNFEGDTVFPEIDEEKWIESNRIEKKKDENHNYDFTFITYNKIKR

SEQ ID NO: 1678 - protein, 167 aa, Artificial Sequence
  Description of Artificial Sequence:  Synthetic peptide
MIEYVWAEDKEKNIGLNGHLPWYLPADMKHFKEVTINHPIIMGRKTFESFPNLLPKRKHIVLTHNEELKNKYQNNDQVTILPTVEDLHNFVAEHQDERMCAIGGVSIFNALMDQVEVLEKTEIDAIFEADTKMPEIDYSRFNLVAKKHYEPDEKNKYPYTFLTYKLK

SEQ ID NO: 1679 - protein, 160 aa, Artificial Sequence
  Description of Artificial Sequence:  Synthetic peptide
MIAAAAENNALGKDGDLVWHLPDDFKRFKKLTTGHHIIMGRKTFESFPKPLPNRTHIVITRNRDYTKEGCIVVHNLEDALKIAEEDTQPFIIGGGEIYKLALNASEKIELTRVHDTFEADAFFPEIDLSKWELMNEEFHEIDERHSVSFTYLTYVKKTAS

SEQ ID NO: 1680 - protein, 162 aa, Artificial Sequence
  Description of Artificial Sequence:  Synthetic peptide
MKITLIAAAAENNALGKDNDLVWHLPDDFKRFKKLTSHHHIIMGRKTFESFPKPLPNRTHIVITRKSDYDAGEHIIVVNSIEEAIKTVVDDENPYIIGGGEIYKLGMEFATHIELTRVHGTFEADAFFPEIDDDTWELLEESYHPKDEKHDYAFTYLTYAKR

SEQ ID NO: 1681 - protein, 143 aa, Artificial Sequence
  Description of Artificial Sequence:  Synthetic peptide
MENRELTIIAAVSINNVIGNNNKLIWKLSNDLKRFRNLTTNHSVIMGRKTFESLPNPLPDRDNIVITRDTNYSKPNIQVCSSIEDAINLTKTDMQPFIIGGGEIYSQTINIVDKIELTRVHKEFDGDAYFPEIPLDIFELINE

SEQ ID NO: 1682 - protein, 100 aa, Artificial Sequence
  Description of Artificial Sequence:  Synthetic peptide
MVTIIVAASENDVIGDNNKLIWHLSKDLIRFKNLTKGHHVIMGRKTFESMPKALPNRTNVVITRNKNYTAENIVVVDSIENALKVCKDDPQPFIIGGGEI

SEQ ID NO: 1683 - protein, 138 aa, Artificial Sequence
  Description of Artificial Sequence:  Synthetic peptide
MKNRELTIIAAVSINNVIGNNNKLIWRLSNDLRRFRDLTTNHSVIMGRKTFESLPEPLPNRDNIVITRDTNYSKPGIQVCGSIEDAISLTKKDIQPYIIGGGEIYSQTINIVDKIELTRVHQEFDGDAYFPRNTIRYF

SEQ ID NO: 1684 - protein, 164 aa, Artificial Sequence
  Description of Artificial Sequence:  Synthetic peptide
MVKSELTIIAAVSTNNVIGFNNKLIWNIPNDLKRFKELTLGHSVIMGRKTFESLPNPLPKRRNIIITKNKDYSRDGIEVTSNIEDAIDLCKNDSQPFIIGGGEIYSQTIEIVDKIELTRVFENYKGDAFFPNIPLNKFKLVNEKVNYLDNDIKLKYSFLTYTKK

SEQ ID NO: 1685 - protein, 167 aa, Artificial Sequence
  Description of Artificial Sequence:  Synthetic peptide
MNNISIIVAVSSNQVIGKNNKLAWNLPYDMKYFSNITRNHTVIMGRKNWESIPKKYRPLPKRNNIIISRNKKYETKSSIVVNSIEKAIEIARNNNDDETFIIGGGEIYKASFNYVNKLYITEIKSNIKGNTYFPKWDKKKWKEISRISNKKDKFHKQDFDFVVYVRK

SEQ ID NO: 1686 - protein, 167 aa, Artificial Sequence
  Description of Artificial Sequence:  Synthetic peptide
MFISMWAQDKNGLIGKDGLLPWRLPNDMRFFREHTMDKILVMGRKTYEGMGKLSLPYRHIIVLTTQKDFKVEKNAEVLHSIDELLAYAKDIPEDIYVSGGSRIFQALLPETKIIWRTLIDAEFEGDTFIGEIDFTSFELVEEHEGIVNQENQYPHRFQKWQKMSKVV

SEQ ID NO: 1687 - protein, 176 aa, Artificial Sequence
  Description of Artificial Sequence:  Synthetic peptide
MKNVFPLTCIVAVSSDKIIGDGEKLLWHIPEDLKRLKLMTMGNPLIMGRKTFESIGRPLPGRANIVITRNQNFKSEGAYIVNSLDSAIEKSNSWIYENFNNREIKSKKIFLFGGGQIYNLALKFCRSIEMTIVDIVVGKGIKFPNINENEWSKQLKQKKKSKQKNLHFSYWTFTRK

SEQ ID NO: 1688 - protein, 153 aa, Artificial Sequence
  Description of Artificial Sequence:  Synthetic peptide
MNISIIAAIGKNNEIGLNNDLLWSISEDLQNFKKITMGHYLVMGRKTFQSIGKELKGRKLIILTSDPYLSVGEHLIAHSVEEAIYLADKNGEEELMICGGSKVYKDFMSKANTMYLSRVDWTGDADTFFPEYDESNWILKKEDFYPSKNESTP

SEQ ID NO: 1689 - protein, 159 aa, Artificial Sequence
  Description of Artificial Sequence:  Synthetic peptide
MIIKKNLKNPIFCIVAMNENRIIGDGKNLLWHLPGDLKRLKTMTMGSPLIMGRKTWDSIGKPLPGRANIVLTNSISWRANGAIVVNSFQDAITKADEWIDLNMEINQNIIQKKIFLFGGAQIYKIGLKYCDNIEMTKVKFDLKTGIKFPKLNKREWEKT

SEQ ID NO: 1690 - protein, 164 aa, Artificial Sequence
  Description of Artificial Sequence:  Synthetic peptide
MEITLIAAFDKNQAIGKQGDLPWHLSSDLKHFKKITTGNTIIMGRKTFDSIGKALPNRKNIVLTRNEKWEYEDIITINNPNEINSICKNENEIFIIGGAEVYKAFLKTATKMILSYVETEVEFADAFFPEFEKEHWTIINQSEFIKEEKDDFPYRIMTLKRLVK

SEQ ID NO: 1691 - protein, 170 aa, Artificial Sequence
  Description of Artificial Sequence:  Synthetic peptide
MTKKIVAIWAQDENGLIGKGDRLPWSLPADLAHFKETTIGHTMVMGRITFDGMGKRALPNRHTIVLTTDKTYQLESERITILHSVEDVLDWYNKQEQTLFVIGGGQIFTAFAPYIETLIVTDIHGQFNGDVYFPKAFPMEKFQLQSANLRPKDEKNPYDFTIKTYERRDG

SEQ ID NO: 1692 - protein, 168 aa, Artificial Sequence
  Description of Artificial Sequence:  Synthetic peptide
MTKKIVAIWAQDEEGVIGKDNRLPWHLPAELQHFKETTLNHAILMGRVTFDGMGRRLLPKRETLILTRNSEEKIDGVATFHDIQSVLDWYQAQDKNLYILGGKQIFQAFEPYLDEVIVTQIHARVEGDTYFPEEFDLSLFETVSSKSYTKDEKNPYDFTIQYRKRKEV

SEQ ID NO: 1693 - protein, 168 aa, Artificial Sequence
  Description of Artificial Sequence:  Synthetic peptide
MIIGIWAEDEAGLIGEADKMPWSLPAEQQHFKETTMNQVILMGRKTFEGMNKRVLPGRISIILTRDETYQSDNEKVLIMHSPKEVLDWYHKQNKDLFITGGAEILALFESELELLYRTVVHEKFKGDTYFPSTFDFGRFKLVSEKFHDKDERNSYTFTIKKYEKVKQP

SEQ ID NO: 1694 - protein, 165 aa, Artificial Sequence
  Description of Artificial Sequence:  Synthetic peptide
MTKEIIAIWAEDEAGLIGIAGKLPWYLPKELEHFKKTTLHQAILMGRVTFEGMNCKRLPQRQTLVMTRNRDYQVDEVLTMTSIEKVLEWYHAQDKTLYIIGGNKVLEAFNGYFDRIIKTVIHHRFKGDTYRPNLDFSHFTQESQTFYARDAKNPYDFTVTALKHK

SEQ ID NO: 1695 - protein, 170 aa, Artificial Sequence
  Description of Artificial Sequence:  Synthetic peptide
MNNKREKKIVAIWAEDDRHLIGVKGSLPWHLPKELNHFKEMTMGQALLMGRVTFDGMNRRVLPGRDTLILTHDPQFKAEGVSIVHSVPEALSWYRQQDKSLFIVGGASIYKAFESYYDKIIKTSVHGQFEGDTYFPLRDFSSFQEISQAFFEKDENNSHDFTVTVLEKKE

SEQ ID NO: 1696 - protein, 174 aa, Artificial Sequence
  Description of Artificial Sequence:  Synthetic peptide
MIAVVAMSENRVIGDGKGLIWHIPNDLKRVKTLTMACPLIMGRKTWDSIGRPLPGRASIVMTRDRSWSADGAIAVPNFEAAIEAARSWIENTARSRSEIILFGGGEIYRQGLEYCHRVERTVIAKKLDGGTGAAYFPELSATDWDIEIEAEIAAAGGVPAYRYERVVKREPPKR

SEQ ID NO: 1697 - protein, 167 aa, Artificial Sequence
  Description of Artificial Sequence:  Synthetic peptide
MSKQIIAIWAEARNHVIGKNHTMPWHLPAELAHFKKTTMGSAILMGRVTFDGMNRRCLPGRETLILTRDKDFDCEEVTTVTSVEEALAWFEQQDKDLYIAGGAGVYKAFDGHYDVLIKTTIEADLEGDTYFPQLDTTAFKEVSRDRVPKNEKNAYDFSISRYEKERD

SEQ ID NO: 1698 - protein, 164 aa, Artificial Sequence
  Description of Artificial Sequence:  Synthetic peptide
MTKQIIAIWAEDEDHLIGVNGGLPWRLPKELHHFKETTMGQALLMGRKTFDGMNRRVLPGRETIILTKDEQFQADGVTVLNSVEQVIKWFQEHNKTLFIVGGASIYKAFLPYCEAIIKTKVHGKFKGDTYFPDVNLSEFKVISRDYFEKDEQNAHAFTVTYFEK

SEQ ID NO: 1699 - protein, 169 aa, Artificial Sequence
  Description of Artificial Sequence:  Synthetic peptide
MILTHVVACSQNRVIGAQGGLPWSLPEDMKFFRETTKGHIMIMGRKTFDSFNGRALPNRYHIVVTRDPSKQSFNSTESSPVVFVASIEEAVKHAEPLTAKWGDEVFIIGGGEIYKQAMPITDKIYLTLIHREFPGDTYYPEIDEKVFTQTERRDIETPIPFSFLTYLRK

SEQ ID NO: 1700 - protein, 156 aa, Artificial Sequence
  Description of Artificial Sequence:  Synthetic peptide
MTLSLIVAVSKNGFIGKDGSLPWQISEDLKRFRKITSNSVVIMGKNTFLSIGKPLPNRENIVVSTTLKSADGCKVVRSLVEAINSSKENFPNKDIFLIGGYAIYKNGEIFADTLYLTKVDIEVEGDVRLPNFDWESWKEMEREDFFDEGSGINCAL

SEQ ID NO: 1701 - protein, 163 aa, Artificial Sequence
  Description of Artificial Sequence:  Synthetic peptide
MIGLIVARSKNNVIGKNGNIPWKIKGEQKQFRELTTGNVVIMGRKSYEEIGHPLPNRMNIVVSTTTEYQGDNLVSVKSLEDALLLAKGRDVYISGGYGLFKEALQIVDKMYITEVDLNIEDGDTFFPEFDINDFEVLIGETLGEEVKYTRTFYVRKNELSRFW

SEQ ID NO: 1702 - protein, 154 aa, Artificial Sequence
  Description of Artificial Sequence:  Synthetic peptide
MKGILVAVSPEGIIGKDNTIPWHYSADLKRFKRLTTGNTIIMGRKTWESLPKKPLPNRRNIVITRSSIENIECFKSIDDALQTCEGDIWFIGGAGIYQEAMQKADIIDMTLVPDNVTGEKCIYFPEIDKSWKEGETKTLDEEPKLKHKTYTRRV

SEQ ID NO: 1703 - protein, 169 aa, Artificial Sequence
  Description of Artificial Sequence:  Synthetic peptide
MAFQDLEVVHVVAMDQKQCIGKGNALPWHIPADLKHFKEITQDGVVIMGRKTLESMGRTLPKRVNWVITRDPNWQFEGAKVASSIEAALKGAAQDLQHTDKKTLFIIGGGEIFKQTINIADRLELTHVELDVQGDAYYPAIPSQFNKVSSEKHFDDKTGIAFEFVSYQK

SEQ ID NO: 1704 - protein, 189 aa, Artificial Sequence
  Description of Artificial Sequence:  Synthetic peptide
MPPSTTLILAATVPRYGIGLNGGLPWRLAKEMKFFKQVTTAQKNAVVIMGRTTWDSIPPKFRPLPDRTNIVLTSRPMTDAPEEVVVARSFDEALTKCPEDSTVYVIGGSQVYKTALVHEHTKAVLLTEITCPDGHVECDTFFEGFDQGLWKKQPYERLQDFVGDKVELPGRDTPVEEKGFSFVYTLWEK

SEQ ID NO: 1705 - protein, 129 aa, Artificial Sequence
  Description of Artificial Sequence:  Synthetic peptide
MKGILVATSPENVIGKDNTIPWHYSEDLKRFKRLTIGKTVIMGRKTWESLPVKPLPDRRNIVITRQKIDGVEYFKSIDRALEECKGDIWFIGGAGIYEEAMGKADLIDMTLVPDNISGDDCIYFPDIDD

SEQ ID NO: 1706 - protein, 188 aa, Artificial Sequence
  Description of Artificial Sequence:  Synthetic peptide
MSYANTEVAQIVAISSNRCIGKDNELPWHISADLQHFKSMTTKPNDGAIQGIVIMGRKTFESMGSKPLPKRVSFIISTQVDYAEQKGLVGSEKAYVMHNLDDALTQAASLAHGAHLDTIWVIGGERVFSDALMYTDRIELTHVDTEITDGDAFYPELPSEFEIAEESEQMHDDKSALDFRFVTYKVEA

SEQ ID NO: 1707 - protein, 165 aa, Artificial Sequence
  Description of Artificial Sequence:  Synthetic peptide
MTKIKMVWAEDRQHAIGKDGGIPWHMPDDLKLFRDETVNTLMIMGRPTWLSIGRPLPKRTTVVMTRQEDWTPSYPEVKVIHSIEEAKNLIAKEERDITIAGGAAVYREFMPYATDLVITRVDGVIDGDTFVDEVDLTQFQLKSSEPHAKDDNHDYAFVVERYERI

SEQ ID NO: 1708 - protein, 154 aa, Artificial Sequence
  Description of Artificial Sequence:  Synthetic peptide
MFISIWCEDKNRGIGKNNKLPWNIKEDLNLFKKHTLNNTIVMGKNTFLSIGKALPNRKNIVISKTLDASLYKDIEVYDDIEQFYNEYKNRDESIFIIGGKSIYDYFINKCSILYVSKLNSAYECDLFMDNSFDGFEIVNQKEYEQFTFFEYRKV

SEQ ID NO: 1709 - protein, 201 aa, Artificial Sequence
  Description of Artificial Sequence:  Synthetic peptide
MQSLELTLIVAATRNMGIGAQGGMPWQGLRKEMKYFARVTTRLPPQAPSPSLNAVIMGRKTWDSIPTKFRPLKDRLNIVISRSAPLNLPETVELTEPVRVQSLELALQYARARSDINRVFVIGGAQIYDAALKLPEARRILLTSIERDFDCDTFFPVDLKGGKWERKSREELQEWTGEEIEEGGQEEAGTKYEFQMWEKNE

SEQ ID NO: 1710 - protein, 145 aa, Artificial Sequence
  Description of Artificial Sequence:  Synthetic peptide
MGDKGKIPWFIRGELKRFKDITMGHNVVMGRKTFESIGKVLEGRRNIIISNNKSFQADAAIVESSFDLALSQCDEGKDIYIIGGSTIYEMALKYCDYLYLTVIHKAFPGDTYFPEYDSRKWTLINETRNYDLENKFSYSYLSYKV

SEQ ID NO: 1711 - protein, 158 aa, Artificial Sequence
  Description of Artificial Sequence:  Synthetic peptide
MIWAEDLRHGIGKQQSIPWHIPGDMAFFKKTTSGNTVVMGRKTFDSIGKALPNRKNIVLSHHPTSLPDSVVGVGSLSELQAIFETHPNEKFYIIGGSHLYNALLSQADELLITRIQKDYQCEVLAPDITQNEFKLASSVEHESTERNPAYTFETWIRI

SEQ ID NO: 1712 - protein, 169 aa, Artificial Sequence
  Description of Artificial Sequence:  Synthetic peptide
MGIKYSLIVAIGKHREMGADNDLLWHLPRDMQFFKETTTGHAVVMGRKSWESIPQKYRPLPNRLNFVLTRDKNYSAEGATVIYDLKEVAQHLEGKNLTCFIIGGAQIYQLALETGLLNEMYVTQVHNTFEEADTFFPFVNWGEWEEEDILEQDKDEKHLYSFNIKKFTR

SEQ ID NO: 1713 - protein, 195 aa, Artificial Sequence
  Description of Artificial Sequence:  Synthetic peptide
MMNIEGEEMRKPIRLIAAACRDMGIGKDGQIPWCLPKEFQFLLDTITAVSAPGKKNLIVWGRICWFSCPETVFPLANCINLVLSRKMISVPPHAHYLCKDFDSIIRLVSEPPLCHTVEVIWILGGTEVYKESLEHPWCDLIYLTDIMANFECDVFFPEFDPNIFRKQKSFPGVPDEIIEENGIKFQFQVFKKIKN

SEQ ID NO: 1714 - protein, 167 aa, Artificial Sequence
  Description of Artificial Sequence:  Synthetic peptide
MHSNIQRQVCTNSKQMTIVVAMTAERIIGRRGQLPWSIPEDLALFRRLTYGHTLVMGRRTFESIGRPLPGRFNIVVSRSMPPVEGLRVCRHFAEALQVADQGNGDIFFIGGCEIYRQALIVAGKLSVSWIRKNYPGDCRFPEYRSDDWLIEQEQDYSEFRHIIYRRR

SEQ ID NO: 1715 - protein, 164 aa, Artificial Sequence
  Description of Artificial Sequence:  Synthetic peptide
MKVIVAVDLNWGIGYGGKLLQSIPEDMKFFKEKTVGNVVVMGRETFKSLPGKKALKDRVNIVLTRSKSFNDDRLIVCNSIDETLKELQKYENDKIFIIGGETVYKQFLPYCNELYVTKIQKTYEADRFFPNIDIMSNWDLIKESEVKEYNNIRYVFSTYINNSL

SEQ ID NO: 1716 - protein, 205 aa, Artificial Sequence
  Description of Artificial Sequence:  Synthetic peptide
MSRLTIIVAATKANGIGKGSNLPWRLAKEMKYFARATSEAPEGTRNAVVMGRTTWESIPEKFRPLPNRVNVVVSRNENYELEPGKEPSPMARLANSLSSGLRHLTTTDGLTVNRIFVIGGASLYRETLSLARSKTGPFVDRILLTRIVEPDFDCDVFMPEFNADGKEWTRSTHAELQEWVGFSVPEGIQEENGVKYEFQMWTRSS

SEQ ID NO: 1717 - protein, 196 aa, Artificial Sequence
  Description of Artificial Sequence:  Synthetic peptide
MEPAKVIKKPVRLIAAKCNGGGIGKDNRMPWSLPSEFRFFLSTITRVSRPGKMNMIIWGKQCWISHPESTFPLPNVLHTVLSTTLFAVPDHAHFVCETLDAAVRLASEPPLADLIEIVWIVGGVQVYKEAMEHPWCDLIYLTDIMAEFECDVFFPEFDRQLFQVQDGFPDVPDGIQEENGIKYKCQVYKRETAAED

SEQ ID NO: 1718 - protein, 217 aa, Artificial Sequence
  Description of Artificial Sequence:  Synthetic peptide
MSKVPVVGIVAALLPEMGIGFQGNLPWRLAKEMKYFREVTTLTNDNSKQNVVIMGRKTWESIPQKFRPLPKRINVVVSRSFDGELRKVEDGIYHSNSLRNCLTALQSSLANENKIERIYIIGGGEIYRQSMDLADHWLITKIMPLPETTIPQMDTFLQKQELEQRFYDNSDKLVDFLPSSIQLEGRLTSQEWNGELVKGLPVQEKGYQFYFTLYTKK

SEQ ID NO: 1719 - protein, 206 aa, Artificial Sequence
  Description of Artificial Sequence:  Synthetic peptide
MTAANGKVTPPIAMIVAALLPELGIGIKGKMPWRLRQEIKYFKNVTTTTKDPNGINAVIMGRKTWESIPTKFRPLPGRLNIVLSRSYVSHGSNDEDIILTNSIENALAKVEEYSKPVEKIFVIGGSELYNKLISHEKVQHLLITEIKSTRPVEVDTWLKFPIYTESSDWTKQTNDDLLKFTGIDNEDVEITEGDFTYKYTYWKKKV

SEQ ID NO: 1720 - protein, 167 aa, Artificial Sequence
  Description of Artificial Sequence:  Synthetic peptide
MKAIVAVDSNWGIGYKGNLLQRIPEDMRFFRQMTLNKVVVMGRKTFESLPGKEPLKDRVNIILSKSENIEKDGIIICRSVDGLFLELKKYNSDDIFVIGGEEVYTQLLPYCSEAHVTKFNGAYSADRYFPNLDEMEGWKLVCVGEPKEFNDIRYNRLKYVNENPKVY

SEQ ID NO: 1721 - protein, 211 aa, Artificial Sequence
  Description of Artificial Sequence:  Synthetic peptide
MAGGKIPIVGIVACLQPEMGIGFRGGLPWRLPSEMKYFRQVTSLTKDPNKKNALIMGRKTWESIPPKFRPLPNRMNVIISRSFKDDFVHDKERSIVQSNSLANAIMNLESNFKEHLERIYVIGGGEVYSQIFSITDHWLITKINPLDKNATPAMDTFLDAKKLEEVFSEQDPAQLKEFLPPKVELPETDCDQRYSLEEKGYCFEFTLYNRK

SEQ ID NO: 1722 - protein, 229 aa, Artificial Sequence
  Description of Artificial Sequence:  Synthetic peptide
MQTTAKSSTPSITAVVAATAENGIGLNGGLPWRLPGEMKYFARVTTGETPSSDPSEQNVVIMGRKTWESIPSRFRPLKNRRNVVISGKGVDLGTAENSTVYTDIPSALSALRSTTESGHSPRIFLIGGATLYTSSLLPSSVPSLNSSTSTSPLPFSRPLIDRILLTRILSPFECDAYLEDFAAHTKPDGSKVWKKASIKEFREWIGWDIEEQVEEKGVKYIFEMWVLNQ

SEQ ID NO: 1723 - protein, 211 aa, Artificial Sequence
  Description of Artificial Sequence:  Synthetic peptide
MGISRVPVVSIVACLLPEYGIGYQGQLPWRLAREMKYFRQATTATFDPTKRNAVVMGRKTWESIPARWRPLPGRLNVVVSRTYTSPWAHDENGHVITSNSLQQCVRQLQEQARALGVERIYIMGGAEIYNQSYDLCDHLLVTELQVAPDGPAVLLDTFLARDVLEQSFAKNSAGPRALLPPSVELPECPATALEEGGFQFRFALYDHLNRD

SEQ ID NO: 1724 - protein, 206 aa, Artificial Sequence
  Description of Artificial Sequence:  Synthetic peptide
MDWQKSLTLIVALTLSRGIGLKNDLPWKLKSDMMFFSRVTSGLLVTRSTGQMNVVLMGGKTWESLPAHSRPLKNRINVVISRQEVLDLGGGAYHARSLDDALALLSQIYDSTSKIQLNRVFVIGGGELYKAAMEHSRLNRIIATVIHNEVDCDVFFPIDFRSSQSCLPWRKQDHSVLEAWVGSKVPQGKINENGFIYEFEMWIRDI

SEQ ID NO: 1725 - protein, 232 aa, Artificial Sequence
  Description of Artificial Sequence:  Synthetic peptide
MSCKPSVCCVVACLMPGYGIGYQGSLPWRLSKEMKYFRQLTSATRDSSMRNAVVMGRKTWESIPAKFRPLPNRLNVVVSRNCQLDINDEQTQFTKSRVGDDDDDDGGDDATLYAGDLSRAIDQLIANSKILGLETIYIIGGGDIYRQCIPMSHNLFITKIVPDLGMPVPPMDTFLDREQIESQFKEQPHHKLQEIVPKEVSLPQFSADSSSAPTISEKGFTYSFTLWSRDTQ

SEQ ID NO: 1726 - protein, 160 aa, Artificial Sequence
  Description of Artificial Sequence:  Synthetic peptide
MRTLKVSLMAAKAKNGVIGCGPDIPWSAKGEQLLFKALTYNQWLLVGRKTFESMGALPNRKYAVVTRSGWTSNDDNVVVFQSIEEAMDRLAEFTGHVIVSGGGEIYRETLPMASTLHLSTIDIEPEGDVFFPSIPNTFEVVFEQHFTSNINYCYQIWKKG

SEQ ID NO: 1727 - protein, 109 aa, Artificial Sequence
  Description of Artificial Sequence:  Synthetic peptide
MTTGGSWKAIAAVSQNGVIGKNGDLPWRLPNDLKWFKKITMGHILLMGRKTWESLPGPLPGRENWVLSRSMEAVDGVRILRSLDEVKRELEDRTLFIMGGGELYALTLK

SEQ ID NO: 1728 - protein, 167 aa, Artificial Sequence
  Description of Artificial Sequence:  Synthetic peptide
MAMIVAMDRDGCIGKGNGLPWRLSSDMARFKRLTEADGFNSVVMGRRTWESLPDRFRPLPERANIVMSRDTDWEDDGAITALYVGRAIEIAFAEGSDECWIIGGAQIYEMFMDRVEEIHVTEVQTNNSGDVFFPKWDRSLWSQQLIETVGTDEENEYDSTYSIWTKG

SEQ ID NO: 1729 - protein, 169 aa, Artificial Sequence
  Description of Artificial Sequence:  Synthetic peptide
MIELHAILAATANGCIGKDNALPWPPLKGDLARFKKLTMGKVVIMGRKTYESLPVKLEGRTCIVMTRQALELPGVRDANGAIFVNNVSDAMRFAQEESVGDVAYVIGGAEIFKRLALMITQIELTFVKRLYEGDTYVDLAEMVKDYEQNGMEEHDLHTYFTYRKKELTE

SEQ ID NO: 1730 - protein, 152 aa, Artificial Sequence
  Description of Artificial Sequence:  Synthetic peptide
MVAISKNGVIGNGPDIPWSAKGEQLLFKAITYNQWLWVGRKTFESMGALPNRKYAVVTRSSFTSDNENVVVFPSIKDALTNLKKITDHVIVSGGGEIYKSLIDQVDTLHISTIDIEPEGDVYFPEIPSNFRPVFTQDFASNINYSYQIWQKG

SEQ ID NO: 1731 - protein, 187 aa, Artificial Sequence
  Description of Artificial Sequence:  Synthetic peptide
MKLSLMVAISKNGVIGNGPDIPWSAKGEQLLFKAITYNQWLLVGRKTFESMGALPNRKYAVVTRSSFTSDNENVLIFPSIKDALPNRKYAVVTRSSFTSDNENVLIFPSIKDALTNLKKITDHVIVSGGGEIYKSLIDQVDTLHISTIDIEPEGDVYFPEIPSNFRPVFTQDFASNINYSYQIWQKG

SEQ ID NO: 1732 - protein, 187 aa, Artificial Sequence
  Description of Artificial Sequence:  Synthetic peptide
MKISLISATSENGVIGNGPDLPWSAKGEQLLFKALTYNQWLLVGRKTFDSMGVLPNRKYAVVSRKGISSSNENVLVFPSIEIALQELSKITDHLYVSGGGQIYNSLIEKADIIHLSTVHVEVEGDINFPKIPENFNLVFEQFFLSNIITHIRFGKKANKSFQHQPALLGQFLSRGFMVFCAKVFHKT

SEQ ID NO: 1733 - protein, 157 aa, Artificial Sequence
  Description of Artificial Sequence:  Synthetic peptide
MKLSLMAAISKNGVIGNGPDIPWSAKGEQLLFKAITYNQWLLVGRKTFESMGALPNRKYAVVTRSSFTSSDENVLVFPSIDEALNHLKTITDHVIVSGGGEIYKSLIDKVDTLHISTIDIEPEGDVYFPEIPSSFRPVFSQDFVSNINYSYQIWQKG

SEQ ID NO: 1734 - protein, 157 aa, Artificial Sequence
  Description of Artificial Sequence:  Synthetic peptide
MKISLMAAVSENGVIGSGLDIPWHVQGEQLLFKAMTYNQWLLVGRKTFDSMGKLPNRKYAVVTRSKIISNDPDVVYFASVESALAYLNNATAHIFVSGGGEIYKALIDQADVIHLSVIHKHISGDVFFPPVPQGFKQTFEQSFSSNIDYTYQIWAKG

SEQ ID NO: 1735 - protein, 157 aa, Artificial Sequence
  Description of Artificial Sequence:  Synthetic peptide
MKVSLTAAKAKNGVIGCGPHIPWSAKGEQLLFKALTYNQWLLVGRKTFESMGALPNRKYAVVTRSAWTADNDNVIVFPSIEEAMYGLAELTDHVIVSGGGEIYRETLPMASTLHISTIDIEPEGDVFFPNIPNTFEVVFEQHFSSNINYCYQIWQKG

SEQ ID NO: 1736 - protein, 152 aa, Artificial Sequence
  Description of Artificial Sequence:  Synthetic peptide
MAAKSKNGIIGNGPDIPWSAKGEQLLFKAITYNQWLLVGRKTFESMGALPNRKYAVVTRSNFSTNDEGVMVFSSIQDALINLEEITDHVIVSGGGEIYKSLISKVDTLHISTVDIERDGDIVFPEIPDTFKLVFEQDFESNINYCYQIWQKS

SEQ ID NO: 1737 - protein, 157 aa, Artificial Sequence
  Description of Artificial Sequence:  Synthetic peptide
MKISLISATSENGVIGNGPDIPWSAKGEQLLFKALTYNQWLLVGRKTFDSMGVLPNRKYAVVSRKGISSSNENVLVFPSIEIALQELSKITDHLYVSGGGQIYNSLIEKADIIHLSTVHVEVEGDINFPKIPENFNLVFEQFFLSNINYTYQIWKKG

SEQ ID NO: 1738 - protein, 184 aa, Artificial Sequence
  Description of Artificial Sequence:  Synthetic peptide
MVAISKNGVIGNGPDIPWSAKGEQLLFKAITYNQWLLVGRKTFESMGALPNRKYAVVTRSSFTSDNENVLIFPSIKDALTNLKKITDHVIVSGGGEIYKSLIDQVDTLHISTIDIEPEGDVYFPEIPSNLGQFYQDFASNINYSYKSGKGLQVAATDRNLSRLCTKAAPGCDPLCSVRLHEIVH

SEQ ID NO: 1739 - protein, 157 aa, Artificial Sequence
  Description of Artificial Sequence:  Synthetic peptide
MKISLMAAKSENGVIGKGADIPWMVKGEQLLFKAITFNQWLLVGRKTFDSMGVLPNRKYAVITRSGLLSQNDNVLVFPSIEDALRELAQQTEHIIVAGGGEIFKAMINRADTLHLSTVHQNIDGDITFPQVPKDFKLVFEQYFESNINYTYQIWQRP

SEQ ID NO: 1740 - protein, 132 aa, Artificial Sequence
  Description of Artificial Sequence:  Synthetic peptide
MKISLISAVSENGVIGSGPDIPWSVKGEQLLFKALTYNQWLLVGRKTFDSMGVLPNRKYAVVSKNGISSSNENVLVFPSIENALKELSKVTDHVYVSGGGQIYNSLIEKADIIHLSTVHVEVEGDIKIPYNA

SEQ ID NO: 1741 - protein, 157 aa, Artificial Sequence
  Description of Artificial Sequence:  Synthetic peptide
MKISIMAAVSENGVIGSGLDIPWHVQGEQLLFKAMTYNHWLLVGRKTFDSMGKLPNRKYAVVTRSEMVSNDPDVIYFTSIESALSYLDNTTTHVFVSGGGEIYKALIEQADVIHLSVIHKHISGDVFFPSVPQSFKQTFEQSFSSNIDYTYQIWAKG

SEQ ID NO: 1742 - protein, 152 aa, Artificial Sequence
  Description of Artificial Sequence:  Synthetic peptide
MAARAKNGVIGCGPDIPWSAKGEQLLFKALTYNQWLLVGRKTFESMGPLPNRKYAVVTRSNWTAANENVVVFPSIDEAMGRLGEITDHVIVAGGGEIYHETIPMASTLHVSTIDVEPEGDVFFPNIPGKFDVVFEQQFTSNINYCYQIWQKG

SEQ ID NO: 1743 - protein, 158 aa, Artificial Sequence
  Description of Artificial Sequence:  Synthetic peptide
MKMIAAVGRNYEIGIGNELPWRCPTDLKLFKQLTKNATVVMGRKTMESLKRPLPERHNLVLTRSRGYIPNGFYPAGIDDVLRLPDPVWVIGGGQIYSLFMPHVEEIWLSHIGVDVPGADAFFPAPMMRSLGFVPVETAYTQRANEDEPGFLQIVYRRS

SEQ ID NO: 1744 - protein, 173 aa, Artificial Sequence
  Description of Artificial Sequence:  Synthetic peptide
MAIKLIVAHDLNGVIGYNNLLPWHIPEDLAFFKEMTTGCCVIMGKNTFLSLGSKPLPNRNNIVVSSSLYRNGNYPVAYDNKLGVLPNLSAAIVYATHFNKETGKDVWIIGGSQLYKEVIEKDILDEMYITTVKMEIDNSSCVYFPKEIIKWDKWKSTIIKETDLCTYTHWIKT

SEQ ID NO: 1745 - protein, 182 aa, Artificial Sequence
  Description of Artificial Sequence:  Synthetic peptide
MNGFALVVAVTKTMGIGNKGGLPWSSIRGDMNFLKKITSETKDAAKQNAVIMGRKTYVGIPAKFRPLSNRVNIVISTNANLRKEESIPDSVHIVDSFDLAVTKAYNLPNIENVFVIGGSSVYAEAMKHPQCKTIYYTNILTPDFTCDTFFPKIEENVFKVTSRSDLQQEGETSYEFLTYYRI

SEQ ID NO: 1746 - protein, 169 aa, Artificial Sequence
  Description of Artificial Sequence:  Synthetic peptide
MELIAVVAMDSRRLIGRGDGLPWHCPEDLSAFKALTWGQPLLMGRRTFESILARRGKPLPEREHYVLTARRGPSFPTVRYICSPDQALALPVERLFVIGGASVYAQTADQLDTLYLSLIPGLHTGDVFLPDLGNRWAVEIIEKFQTFKRWRLLRSPSVGFDWSQLVEGG

SEQ ID NO: 1747 - protein, 189 aa, Artificial Sequence
  Description of Artificial Sequence:  Synthetic peptide
MRKMNLIVAMDAEGGIGKNGVLPWRIKKDMQYFASVTKNVSDQSKRNAVLMGRKCWESIPVTRRPLAGRLNIVLSRQLPAQKSDDYIVVNSLEAAMKLLSEPPFVDSIETIWNIGGAEIYDLALRENLVDEIHLTRIFKNFEADVHLKSLDFSKMEKVQNAEVSSENSEIFEENGLKFEFCKWKVVENH

SEQ ID NO: 1748 - protein, 189 aa, Artificial Sequence
  Description of Artificial Sequence:  Synthetic peptide
MRKMNMIVAMDTEGGIGKNGVLPWRIRKDMQYFAAVTKKVSDPAKRNAVLMGRKCWESIPESRRPLPGRLNIVLSRQLEKQNTDNLIVVNSLESALKLLSEAPFVDSIETIWNIGGAEIYDLALRENLVDEIHLTRIHKNFEADVHLKSLDFNKLKKIIDAEASSENSELFEENGLQFEIGKWKIIEHC

SEQ ID NO: 1749 - protein, 193 aa, Artificial Sequence
  Description of Artificial Sequence:  Synthetic peptide
MGILPCPQPHKDKPPTALNAVIMGRKTWDSIPPKFRPLKGRLNVVLSRSFPELKGTPPPPSSAAATTTTTTTTDPDPVVNDRVPIHARSLPEALAYLGQLREQRQAVGKVFIIGGAQIYDVALGLPETRRVLFTSVMSDFECDASVALRLGEGTGWRRTSKEEHDAWVGEEVPAGVQEENGTQYEFQMWERSD

SEQ ID NO: 1750 - protein, 172 aa, Artificial Sequence
  Description of Artificial Sequence:  Synthetic peptide
MISLIVAADENNAIGFENKLLCRLKDDMKHFIKKTKGKPIIMGYKTFASLGHKPLKDRFNIVLTRSPMALTLDHLHLVGENLVFESLEYIQFMIEQSKDKEIVVIGGQQTYELFLPMASRVYLTRIHHSFPEADSYFPMLDSSEWSSKLDAKHAESEDNDHPFSIYTFERKG

SEQ ID NO: 1751 - protein, 206 aa, Artificial Sequence
  Description of Artificial Sequence:  Synthetic peptide
MASTGETICNNGQSAVSVTRRRSYQVVIAATRDMGLGMDMKLPWDLPSEYQFFQDVTTRTSDPTKRNATIMGRKSWESTPLEIRPLPGRLNIVLTKSSCHNIAIDENVLVSSSMESALELLATEPYSLSIEKVFVIGGGELLRNYMNASICDAIHLTEIDISVPCDAFAPRVDTSLYRPWYSSFPVVENGIRYSFNTYVRRKDAIV

SEQ ID NO: 1752 - protein, 204 aa, Artificial Sequence
  Description of Artificial Sequence:  Synthetic peptide
MATTTLNDSVTTTLASEPQRTYQVVVAATKEMGIGKDGKLPWNLPTDLKFFKDITLTTSDSSKKNAVVMGRKTWESIPIKYRPLSGRLNVVLTRSGGFDIANTENVVTCSSVDSALDLLAAPPYCLSIERVFVIGGGDILREALNRPSCDAIHLTEIDTSVDCDTFIPAIDTSVYQPWSSSFPVTENGLRFCFTTFVRVKSSAD

SEQ ID NO: 1753 - protein, 206 aa, Artificial Sequence
  Description of Artificial Sequence:  Synthetic peptide
MASELLANPTNGSGITRPDPQRTYQVVVAATQNMGIGKDGKLPWRLPSDMKFFKDVTMTTSDPLKRNAVIMGRKTWESIPIQHRPLPGRLNVVLTRSGSFDIATVENVVICGSMISALELLAGSPYCVSVEKVFVIGGGQIYREALNAPGCDAVHITEIEEHIECDTFIPLLDESVFQPWYSSFPLVENKIRYCFTTYVRVRNSVA

SEQ ID NO: 1754 - protein, 200 aa, Artificial Sequence
  Description of Artificial Sequence:  Synthetic peptide
MAAVLANGDSQGRPQRNYQVVVAGTRDMGIGKDGVLPWKLPGDLKFFKELTLTTSDPVKKNAVIMGRKTWESIPVKSRPLPGRLNVILTRSGSFDFATVENVVICGSMESALELLASTPYCLSIEKVFVIGGGQVLREYLKGPACEAIHLTDIQSSIECDTFIPPVDFSVFQPWYSSFPVIESNIRHSFVSFVRVRKSVA

SEQ ID NO: 1755 - protein, 158 aa, Artificial Sequence
  Description of Artificial Sequence:  Synthetic peptide
MFKAIMAVDDKGGISRDGSMPWPKNSSDLKWFKKNTLNAIVIMGRATWEDPFMPSPLINRLNILVTNQDKKKYPGADEYISGNIIDSVINLTQKYSNKDFYIIGGSEILNQLFELVEEFYLTRIYGDFDCDKKIDLNMINRSMKMVKKIDNDETCHFE

SEQ ID NO: 1756 - protein, 112 aa, Artificial Sequence
  Description of Artificial Sequence:  Synthetic peptide
MIKAILACDEEGGVSKKGTIPWPKNTKDLGWFKKNTTNNVVVMGSKTWVDPLMPWPLPNRVNVLATTKKSNFPGADKYIKGNLCKEVETLKKENPEKTVWVIGGPNVIEQTL

SEQ ID NO: 1757 - protein, 94 aa, Artificial Sequence
  Description of Artificial Sequence:  Synthetic peptide
MIKAIMAVDEKGGISKGQSMPWPKNSIDLKWFKENTVNNVVVMGRKTWEDPFMPTPLKSRINVLITSKDKELIEGADYYFTGNINDKIQNLQSE

SEQ ID NO: 1758 - protein, 162 aa, Artificial Sequence
  Description of Artificial Sequence:  Synthetic peptide
MIKAIMAVDEKGGISKGSSMPWPKNSNDLQWFKKNTLNQVVVMGSKTWEDPFMPTPLKNRENIIITNKNHSYYPGANLYLKGNIVNEILKLENKYLNKDIFVIGGPDIIKQTFDLFKEFYITRIYGNFNCDKFIDLEKINNNMNLIKKIDCDDTCHFEIWRK

SEQ ID NO: 1759 - protein, 162 aa, Artificial Sequence
  Description of Artificial Sequence:  Synthetic peptide
MIKAIMAVDEKGGISKGKSMPWPKNSIDLKWFKENTINNIVVMGRKTWEDPFMPTPLKSRINILITSKNKELITGADYYFSGNVNDQIQNIQSEYTDMDIFIIGGSEIINLTFKLIEQFYLTRIYGNYDCEKFVDVSLIEKNMKMIKKIDGDSTCHFEIWQK

SEQ ID NO: 1760 - protein, 162 aa, Artificial Sequence
  Description of Artificial Sequence:  Synthetic peptide
MIKAIMAVDEKGGISKGQSMPWPKNSIDLKWFKENTLNNVVVMGRKTWEDPFMPTPLKSRINVLITSKDKELIEGADYYFSGNINHQIQNLQSEYKDMDIFIIGGSEIINLTFKSIEQFYLTRIYGNYNCEKFIDVTSIENSMKMIKKIDGDSTCHFEIWER

SEQ ID NO: 1761 - protein, 162 aa, Artificial Sequence
  Description of Artificial Sequence:  Synthetic peptide
MIKAIMAVDDIGGISKGSSMPWPKNSKDLQWFKKNTLNQVIVMGSKTWEDPFMPTPLKNRENILITSKDNSNYPGANKYIKGDIVNEILNLEKKYLERDIFIIGGPEIIVQTFDLFKEFYLTRIYGNFKCDKFIDIKKIANSMNLIEKIDCDDTCHFEIWRK

SEQ ID NO: 1762 - protein, 157 aa, Artificial Sequence
  Description of Artificial Sequence:  Synthetic peptide
MACDNEGGVSKNGTIPWPKNKKDLGWFKKNTTNNVVVMGSKTWIDPLMPWPLPNRINVLATSRKEEFPGADKYICGDLNAELKTLKKENADKTIWVIGGPNIIEQTIETIEEFYLSRIPGEYSCDGFLSLENIERLFKKTWFEKHEEVEFQIWKKVK

SEQ ID NO: 1763 - protein, 162 aa, Artificial Sequence
  Description of Artificial Sequence:  Synthetic peptide
MIKAILACDNEGGVSKKGTIPWPKNTKDLRWFKKNTTNNVVVMGSKTWVDPLMPWPLPNRINVLATSKKNQFPGADKYIKGNLLKELKNLSKEYPTKTVWVIGGPDILEQTMGAVEEFYLSRIPGTYDCDGFISLKKIKNLFNKTWSEKHSTVEFEIWEKKR

SEQ ID NO: 1764 - protein, 126 aa, Artificial Sequence
  Description of Artificial Sequence:  Synthetic peptide
MIKAIMAVDEKGGISKGQSMPWPKNSIDLKWFKENTTNNVIVMGRKTWDDPFMPTPLKYRINVLITNKDKNLIQGADYYLSGNIKNQIQDIQLKYMDKDVFIIGGSEIINLTFNCIEQFYLTRIYG

SEQ ID NO: 1765 - protein, 200 aa, Artificial Sequence
  Description of Artificial Sequence:  Synthetic peptide
MATTLSNGVSQNGPQRNYQVVVAATRDMGIGKDGVLPWKLLGDLKFFKELTVTTADPVKKNAVIMGRKTWESLPLKARPLPGRLNIILTRSGSFEFATVENVVICGSMNSALELLSSTPYCLSIEKVFVIGGGQVLRESLNGPSCEAVHLTDIQSSIECDTFIPPIDLSVFQPWYSSLPVVESNIRHSFVTYVRVRKTMA

SEQ ID NO: 1766 - protein, 156 aa, Artificial Sequence
  Description of Artificial Sequence:  Synthetic peptide
MACDSNGGVSRGGTIPWPKNIKDLSWFKKNTTDNVVVMGSKTWKDPLMPWPLPNRVNVLATSREKDFPGADKYICGDLNSELKSLKKEYKSKTVWVIGGPNIIEQTIESIEEFYLSRIPGEYDCDGFLSLKNIETLFKKTWFEKHKSVEFQIWKKI

SEQ ID NO: 1767 - protein, 156 aa, Artificial Sequence
  Description of Artificial Sequence:  Synthetic peptide
MACDEEGGVSKKGTIPWPKNTKDLGWFKKNTTNNVVVMGSKTWVDPLMPWPLPNRVNVLATTKKSNFPGADKYIKGNLCKEVEALKKENPEKIVWVIGGPNVIEQTLSVIEEFYLSKIPGKFNCDRFLSLSKIEALFSKTWTEKHETVEFQIWTKK

SEQ ID NO: 1768 - protein, 157 aa, Artificial Sequence
  Description of Artificial Sequence:  Synthetic peptide
MAVDDKGGISRDGSMPWPKNSSDLKWFKKNTLNAIVIMGRATWEDPFMPSPLINRLNILVTNQDKKKYPGADEYISGNIIDAVVSLTQKYNNKDFYIIGGSEILNQLFELVEEFYLTRIYGDFECDKKIDLNMINRSMKMIKRIDNDETCHFEIWKK

SEQ ID NO: 1769 - protein, 157 aa, Artificial Sequence
  Description of Artificial Sequence:  Synthetic peptide
MACDNGGGVSKDGTIPWPKNTKDLGWFKKNTTNNVVVMGSKTWTDPLMPWPLPNRVNVLATTREKEFPGADKYICGDLNKKLKTLRKEYDNKTIWVIGGPNIIEQTIGSIEEFYLSRIPGEYNCDGFLSLDNIESLFTKTWFEKHDSVEFQIWKKNK

SEQ ID NO: 1770 - protein, 171 aa, Artificial Sequence
  Description of Artificial Sequence:  Synthetic peptide
MTTNKTFSMVLAMTLNGGIGYQNRLPWKLKEDLQRFKKITTGGIVIMGRKTFESMNSKPLPNRVNVVISKNMKSSNEVQVFPRIEDALQFYNTSHQKLYLIGGKRIFEEGLATDKCSDVHLTRIGVETKCDVYLNKNIFSTFQVNKTSQTKSENGINYDYQHLINKNSHEQ

SEQ ID NO: 1771 - protein, 252 aa, Artificial Sequence
  Description of Artificial Sequence:  Synthetic peptide
MPPSQPLTLIVATTPIRTSENLPTRLGIGLHGTLPWPRIKADMAFFARATSRPPRPGTTNAIIMGRKTYDSLPQNLRPLAKRINVVITRDSTGSVRERIMKELEAKRAKAAAAAASEQAQAQAQKQEQVQAQTDALVSTGLEDALASLEGSYGAEGRLGNVFVIGGGEIYASALRMSETQPLRIVMTNVERVDGTEFECDTVFPVDEKLAAGGKWRMASEEEVSGWVGEEVSSRWREEGDVRIQMVGYERIL

SEQ ID NO: 1772 - protein, 185 aa, Artificial Sequence
  Description of Artificial Sequence:  Synthetic peptide
MTYQLDVSKILSFDLEAIVAATENGGIGYKGDLPWRLQGDLKRFREITQGGIVIMGAGTYKSLPSPLKDRINIVITKKSEISWTACYDVRVVNSPEDALRMVGRIIDEKEEQGRDRPRVFVIGGASIYQALMPFVSTLHWTEVHVEQLPEEIGLDTYIEDFLSLRGTSTPKRKSNLVLPPTPTTP

SEQ ID NO: 1773 - protein, 182 aa, Artificial Sequence
  Description of Artificial Sequence:  Synthetic peptide
MTMIPDTELVLVVAADENNVIGLDGGVPWHYPEDVRQYKNRIAGHPIILGRRTFESMKPIPDCYTVVLTSDDRRSADSETVEYATTPQIAVEAAARAGASGAFAGDSAGADSSPPVTYVIGGEAVYDLFLPFAGRVFLSRIHEHNEGDRYFPDLGAEWTELSREPHDGFDVIEYEQASPRPL

SEQ ID NO: 1774 - protein, 248 aa, Artificial Sequence
  Description of Artificial Sequence:  Synthetic peptide
MPPTNPLTLIVATTPIPTREKTLLGIGLNGTLPWPRIKADMSFFARVTTRPPRPGTTNAMIMGRKTYDSVPKSLRPLGKRINVIVTRDVEGVSKRVAEELKEKRAKMAAAAAAATSAGENKEEGPITDAIVSSGLEAALEDVEEKFKGGLGSVFVIGGAEIYATALGLGGDRPVRIVMTNVEKKGVDGEKAVFECDTFFPIDEELLMEKGWRKVSAEEVTEWVGEPVSGEWKDEGEVRIQMVGYERVN

SEQ ID NO: 1775 - protein, 198 aa, Artificial Sequence
  Description of Artificial Sequence:  Synthetic peptide
MSNKLTIMIKLIWCEDLNHGIAKNNQIPWKIDEELNHFHQTTTNHPIIMGYNTYLAMNKILANQANIVISKKHQRELKNKNELFLYSDLKKALIDFSIVDLFIIGGKKTIEQAIKYADQLVISKLNADYGCDLFVNLNYDDFSLVQTKEYDQFVVEYWERKPNTKKPEDLIEELNINLNDDFLNLSFKHFSGPFDLLL

SEQ ID NO: 1776 - protein, 159 aa, Artificial Sequence
  Description of Artificial Sequence:  Synthetic peptide
MIVIGIMAVDPKGVIGINNGLPWHYPSELDHFRQVTEKQVIVMGRKTFETMPQDILGNRIPVVFSRDKLNSCFNRGVKCTIISSMQEFLSIQSNSKVFMIGGAQIAYLFLEYDLISEFIITEIHKPYKGDVYFNLTLLDGWHKTILTKTKDYTICKLTR

SEQ ID NO: 1777 - protein, 219 aa, Artificial Sequence
  Description of Artificial Sequence:  Synthetic peptide
MLINIIVAYEKNGGIGLNNSIPWKITSDLKKFKNLTIGNKNNALIMGKNTWLSIKKNLPFRDNLILSSSLNIHNVNNNNITKSFKNEKILKEFIDKKNYDELWIIGGENIYDLFLNKTNIFKIDNIYITLIDKNIDCDRFFPNIDKNIYSFISKSIHNNNNNNNNNNNNNNNNNNNNNIEDISKNQILIIENKDILFNNFITENDNSYNIYDIIYKNNE

SEQ ID NO: 1778 - protein, 162 aa, Artificial Sequence
  Description of Artificial Sequence:  Synthetic peptide
MCKILGIVACDPQGVIGKQGKLPWNYLEDIEFFSKTIGNDALIMGRKTFEGLPDKYKKNRKIIVFSRKYHESVENVLWVSSLEEFRRLEQLSSVFLLGGGELFSLFLEHHMVHGCFITHIHQCYEGDVFFPLSLVQGWKKTVLDEKENLTFCFYENFADWHS

SEQ ID NO: 1779 - protein, 184 aa, Artificial Sequence
  Description of Artificial Sequence:  Synthetic peptide
MNKEIQFSMIVARGVNGEIGQDGDLPWHVEGVRLKEDLKRFKAITMGKTLVMGRKTFESIPNGLPGRNVIVLTREPYDKADITERGDGTFVAWGNSCHLFEVAEHLGVTEIIVAGGAEIYNLHKDVITKVFETKVLRAYPAADTHVDVFWESPGYDTEGRQWRVTSRGHIIENGSFTIATTYER

SEQ ID NO: 1780 - protein, 162 aa, Artificial Sequence
  Description of Artificial Sequence:  Synthetic peptide
MINLITAFDGNYLIGKYNKLPWHYPQDLQYFKKITLNKNVLMGYETYKSLKSYFKNKPFNFKNTYVASLKHDLELPNFTVVSDLQSFLESDVAQEIFIIGGGKIYQQTLPWVTTLYITHILQRHQGNVFFPKIDLSQYQLIQKEIHPQLIFAIYQKKLDTPK

SEQ ID NO: 1781 - protein, 238 aa, Artificial Sequence
  Description of Artificial Sequence:  Synthetic peptide
MSLFKIRMPETVAEGTRLALAAFSLVVAVDEHGGIGDGRSIPWNVPEDMKFFRDLTTKLRGKNVKPSPAKRNAVVMGRKTWDSIPPKFRPLPGRLNVVLSSTLTTQHLLDGLPDEEKRNLHADSIVAVNGGLEQALRLLASPNYTPSIETVYCIGGGSVYAEALRPPCVHLLQAIYRTTIRASESSCSVFFRVPESGTEAAAGIEWQRETISEELTSANGNETKYYFEKLIPRNREEE

SEQ ID NO: 1782 - protein, 164 aa, Artificial Sequence
  Description of Artificial Sequence:  Synthetic peptide
MKNRKIIGIMACDPQGVIGNKGQMPWSYTKEFEYFYQTVKNNIIVMGRKTFDSIPTKILKNCICIVFSRNTPLQSYNNIFFIKSLDDFWQVIKPFTDKKIFMVGGTKIATLFLEQNLIDEFLLTKINKNYDGDTFLPLNLLAEWHSVIIDKTNNYQIYKFTKRR

SEQ ID NO: 1783 - protein, 159 aa, Artificial Sequence
  Description of Artificial Sequence:  Synthetic peptide
MIQATGIVAIDPRGVMGGAGKLPWNYPEDLRFFSETIQDHPIIMGRKTWESLPDRYKCGRTVIVFSRQHSCAQGIWISSLVEYEKLSLNSPFLIGGAELFDWFFQYNLLKSCFVTHIKREYQGDTFFPVERLSGWKRESVLKTEDFNIYHYENYANQNP

SEQ ID NO: 1784 - protein, 162 aa, Artificial Sequence
  Description of Artificial Sequence:  Synthetic peptide
MYKILGIVACDPHGVIGNQGKLPWDYPEDIKFFSKMIENMPLIMGRKTFEGLPDKYIKNGKVIVFSRSFHENSENIIWVSSLEQFHDLDLPSPIFLLGGGELFSLFLEHRMLHGCYVTHIHKCYDGDAFFPLSLLEGWKKTILDEKEDLTFCYYESLSHCYA

SEQ ID NO: 1785 - protein, 168 aa, Artificial Sequence
  Description of Artificial Sequence:  Synthetic peptide
MCKNRGVRGIVACDPRGVIGLEGKLPWHYPEDLQFFSETIQKFPIVMGRKTWETLPRKYFVDRAVVVFSHEKRQGVHGEIWVTSLEEFLLLDLSSPTFLIGGGELYSLFLENQIVRDFFISHIKKEYAGDTFFPLSLLETWTKTVLRDTQKITTCYYENHHSQNTKNI

SEQ ID NO: 1786 - protein, 156 aa, Artificial Sequence
  Description of Artificial Sequence:  Synthetic peptide
MAVDPKGVIGINNGLPWHYPSELDHFRQVTDKQVIVMGRKTFETMPQDILGNRIPIVFSRDKLNSCFNRGVKCTIISSMQEFLSIQSNWSYPQIFVIGGAQIAHLFLEYNLISEFIMTEIYKPYKGDVYFNLTLLDGWHKTILTKTKDYTICRLTR

SEQ ID NO: 1787 - protein, 155 aa, Artificial Sequence
  Description of Artificial Sequence:  Synthetic peptide
MIKLIVALDPNNLIGKGDQMPWKIAEEFKHFKTTTLTHSLLFGRNTFLGLPAKLENRTIYVLSKERVPRADYTLKTEQELFSLFAQFKNDDFNTLFIAGGKTIYEKYYKFADELIISRVKKAYEGDVYLNLDLSHYSLTKVVDYSEFAVEYYTKK

SEQ ID NO: 1788 - protein, 159 aa, Artificial Sequence
  Description of Artificial Sequence:  Synthetic peptide
MIQATGIVAIDPRGVMGALGKLPWSYPEDLRFFAETIRNHPIIMGRKTWESLPDKYKHGRDIVVFSRRMHPPQCIGVSSFAEYGTLSLNHPFLIGGAELFESFFQQNLLKACFVTHIKKEYWGDTFFPITRLSGWKKECICNTEDFSIYYYENNSDQNT

SEQ ID NO: 1789 - protein, 160 aa, Artificial Sequence
  Description of Artificial Sequence:  Synthetic peptide
MLIAIWAMTQEGLIGNNNTLPWMIKQELAHFKKTTLFQALLMGRKTYESLPKVFEKRTIFLLSKDQNYRFEEKGSEVKVINDFWPLIKSYQANKEKDLFICGGKSVYEQTINECDQLIVSIIKKKYKGDQFLKVDLSKFVLNEVVEFEEFNVNYYRKKQQ

SEQ ID NO: 1790 - protein, 264 aa, Artificial Sequence
  Description of Artificial Sequence:  Synthetic peptide
MRRYQFRKLWTPWPNQRKGSCLMIKLIVAMDEANLIGKKDKMPWHIKEEFEHFRKTTIGHALLFGKTTFLGLPGKLENRKHYVFSRKDQISNADETIRSEKELLELFKAYKDSQDILFIAGGKYIYEHYYQYADELIISRIKNKYEGDVYLNLDLSNYFLMNVEENSKFTVEFWLKKSDNNKTNANVISWDEYFMMLANVSAMRSKDPSTQVGACIVNKKKYVIGLGYNGMPKGLDNIFPWDRTNQDSAKTKYPYVVHAEINAI

SEQ ID NO: 1791 - protein, 157 aa, Artificial Sequence
  Description of Artificial Sequence:  Synthetic peptide
MIKLIVAIDPNNLIGSGTQMPWHIKEEFKHFKETTLNHALLFGQNTFTNLPSKLANRISYVFGFTKTPSADFSITSEQELQNLFDKFRNSEEILFISGGKYIYETYFHEAEELIVSELKNIQNGDVYLNWDLSNYKKTLLKEFEEFNVYSYKKKFNV

SEQ ID NO: 1792 - protein, 160 aa, Artificial Sequence
  Description of Artificial Sequence:  Synthetic peptide
MVKAIWAMDQNGLIGNGNSLPWRIKAELQHFRQTTLHQDVLMGSATYLSLPPVFSERNVYILTRNLNFNPPDKGCLTKVIHEYENFIQPYLHHPDKHLYICGGAQVYEQLIPRCDALIVSTIFGKYTGDKYLKVDFSPFELTKEISFAEFKVAYYHKIAR

SEQ ID NO: 1793 - protein, 178 aa, Artificial Sequence
  Description of Artificial Sequence:  Synthetic peptide
MTMNLIQLLKGKWRFKMIISIWAMTKEGLIGKDNQMPWHIKEEFQHFRRQTLHKTLIMGKNTFFSLPKVFDKRKMYVLSHEKDFKIDHPDVEVIYDYKDLLKEYANNDKKDIYVAGGLYVYQQLIPLSDILIVSIVKGSYEGNKYLSVDFSNFVQYKQPEIYDQFSVYYYKKKDQKNS

SEQ ID NO: 1794 - protein, 161 aa, Artificial Sequence
  Description of Artificial Sequence:  Synthetic peptide
MIKMIWAQTEKGVIGKDNSLPWSIKEEMQHFRTTTLNQNVLMGGKTFESMNFKGLPNRINYVLTRDTEKYKEHMSENVNFINKKDFILKEFKGNTSKDVYIIGGSQIYELFFDDCDEIIRSMIKDDFEGNVHIKNFNYDNFDKINIVEKEHFYVEYMNRRK

SEQ ID NO: 1795 - protein, 197 aa, Artificial Sequence
  Description of Artificial Sequence:  Synthetic peptide
MITLIWCQDKHFGIGRDNTIPWKLTEANQHFYNTTKNQTVVMGYNTFQELGDKLTDHNVVVLSKKHFEELQNNTNIKVFNSIEKLLQHHFNRDLYVIGGKQIFHHFIELADRLIISVLPVDFKCNLRLKLGLDSFELMQEQQHSQFKVQYWHKKHPERLSFNVFLEDYNGTLPNLLELLIDKKFNLHQVDIAKITTQ

SEQ ID NO: 1796 - protein, 173 aa, Artificial Sequence
  Description of Artificial Sequence:  Synthetic peptide
MASLNMIVAVNKTGGIGFENQIPWHEPEDLKHFKAVTMNSVLIMGRKTFASLPKVLPGRLHVVVSKTVPPTQNTDQVVYVSTYQIAVRTASLLVDKPEYSQIFVIGGKSAYENLAAYVDKLYLTRVQLNTQQDTELDLSLFKSWKLVSEVPTITENKTKLIFQIWINPNPISE

SEQ ID NO: 1797 - protein, 196 aa, Artificial Sequence
  Description of Artificial Sequence:  Synthetic peptide
MKVSIIVAVSKNNVIGTKAGDIPWELPKDLKHFRDTTHGFPCIIGRISLEAFGDLLPNRFNIIVSSKKEFINIREKIAINLPEYETGITEKGAQYVIVKSVKEAVDYAKDILKTDLVYICGGKGIYEDSQQYSHELIITDVDVHIEENDVVIYNPFPSNDERNKWKVVNQIHHPKDHQNNLDFSITYYVKNEEILI

SEQ ID NO: 1798 - protein, 205 aa, Artificial Sequence
  Description of Artificial Sequence:  Synthetic peptide
MLALVVALASHRGIGNANALPWPRPLAADMAWFRTLSQSIPLISPDRIALAPSASNAVVMGRRTWDSIPSRFRPLANRINVVLSRGPARSTENTFFIQTFEALDSLPLPPSSMTFVIGGRDVYSLALESGRPHLIFATEVFESPECDVFFPHIDWASYEKRDITRDVSRLIDRTLASAFYSPETATFTENGTSFKMFLYTKPETR

SEQ ID NO: 1799 - protein, 190 aa, Artificial Sequence
  Description of Artificial Sequence:  Synthetic peptide
MSTVYEGCGGLTIYVAIALNRVIGHQNQIPWPHIIHDFRFLRNGTTYIPPEVLSKNPNIQNVVIFGRKTYESIPKASLPLKNRINVIISRTVKEVPGCLVYEDLSTAIRDLRANVPHNKIFILGGSYLYKEVLDNGLCDKIYLTRINKEYPGDTFFPDIPDTFEITAISPTFSTDFVSYDFVIYERKDCK

SEQ ID NO: 1800 - protein, 181 aa, Artificial Sequence
  Description of Artificial Sequence:  Synthetic peptide
MKVQIVFAHAMSKSPHAPFGNQNALPWKHNKEDLVRFKAATMNSVLVMGSKTFESLPGKLPHRPHIVLSSSDTATARNGQRADVYCSCDDFGALIKNIENVYLIEGFDKISVIGGPSVIESALPFADCIYKTTIVEEIESYDVTIDLTKIFWHFPHRVESEVVECQNGSTIFIEKLTKGDL

SEQ ID NO: 1801 - protein, 152 aa, Artificial Sequence
  Description of Artificial Sequence:  Synthetic peptide
MVSFDIVVAHDNELGIGKNNDLLWNLPEDMHYFKQLTTASSDKAKQPIVIMGRNTYESIPEKFRPLPNRTSIVVSRSAQYSDKNVHTATSSDHGLEIAAELVAQNKAESIFCIGGGQLYASMINHSACRQLFVTRVDKTFDADTFFPQYTQT

SEQ ID NO: 1802 - protein, 175 aa, Artificial Sequence
  Description of Artificial Sequence:  Synthetic peptide
MAKDETLISAIGAVASNGMLGLAGWLPWDIPEELAYFEKTVAGAALVIGRLTYESMDVVPEDSFVVSRQADLVVRPGCSRVASVEEGLHRALATGKPVFVIGGASVYAAAWRYCHRFYLTRIERAFDGDSRFPESVQLSDWKVESETVRQLREYKSNTDVTCRFLIYQQINPLSL

SEQ ID NO: 1803 - protein, 197 aa, Artificial Sequence
  Description of Artificial Sequence:  Synthetic peptide
MSDGKVCIVVAGAKCSDGRIAIGINNKIPWNSKADMHNFRQLTTSTSMPICENVVIMGTKTWQSIGKRLPNRYNIVISRNKDARRVYNIPNNVGISSSIELAISELKTVSDIETIYVIGGSYIYKDVIDLKIVDKIHMTFVSNQHDPGAFDNCDTFFPLTVNDLESNFIKSKTSYVTKEAHLTCSYHTYKATVIHEE

SEQ ID NO: 1804 - protein, 203 aa, Artificial Sequence
  Description of Artificial Sequence:  Synthetic peptide
MSEDYSGLPFVKILVAITPENGIGIKNGLPWPHIKRDFLFMFRATTYVDPEFKEKHPGAENVIIIGRNTYDSLPESVFPLKNRINIVISRNLTEVPGGLVFSSIPSAIRHVTENLNYYKIFIMGIFNVVVLKYLGGSHVYREVLNAKIVDKMYVTRVNKNYECEVFFPKIPDDFVITGISKTFSSEDTSYDFVLYERKDLIEE

SEQ ID NO: 1805 - protein, 202 aa, Artificial Sequence
  Description of Artificial Sequence:  Synthetic peptide
MAEDYSGLPFVKLLVAITPENGIGISNGLPWPHIKRDFLFMFRATTYVDPEFKEKHPGAQNVIIIGRKTYDSLPEGTFPLKNRINVVISRNLTEVPGGLVFPSMPAAIRHVTEHLNYYKIFIMGIFHLNIKHLGGSYVYRDALDARIVDKMYVTRVNKNYKCEVFFPKIPDDFVITGISKTFSSEDTTYDFVTYERKDLIVD

SEQ ID NO: 1806 - protein, 256 aa, Artificial Sequence
  Description of Artificial Sequence:  Synthetic peptide
MQKPVCLVVAMTPKRGIGINNGLPWPHLTTDFKHFSRVTKTTPEEASRLNGWLPRKFAKTGDSGLPSPSVGKRFNAVVMGRKTWESMPRKFRPLVDRLNIVVSSSLKEEDIAAEKPQAEGQQRVRVCASLPAALSLLEEEYKDSVDQIFVVGGAGLYEAALSLGVASHLYITRVAREFPCDVFFPAFPGDDILSNKSTAAQAAAPAESVFVPFCPELGREKDNEATYRPIFISKTFSDNGVPYDFVVLEKRRKTDD

SEQ ID NO: 1807 - protein, 172 aa, Artificial Sequence
  Description of Artificial Sequence:  Synthetic peptide
MIKAVFATGKFGEFGNKNGLPWGHCRVDMLNFMETTKDSCLLMGAKTFMSLPTKLKNRVNVVLSTSNDTNRVVAKNGERPDMFMHGDVTQALSELQTLYNNICVIGGMTVLKEAIDMADQVVHTVILNEEKLECDVELDETVQEKITSDFYVLSNKFLGDEAITYTSVRKKK

SEQ ID NO: 1808 - protein, 193 aa, Artificial Sequence
  Description of Artificial Sequence:  Synthetic peptide
MSKVKAVFAVGNDAYDEDFAFGYQQGLPWGHCKEDLQNFKAETANSVLIMGANTFTSLPGKLPGRVHCVLSASGQRLVTKNGNTADYIIHCGGLSAAIDVMKATHPDSDVCIIGGKGLLLEAINNTLVDELVITHVYGHRVYNAPAFKRDVSFSVKEFYDAVLKYGYCDFETIHIHDNERVAKLVIDRYTKKA

SEQ ID NO: 1809 - protein, 189 aa, Artificial Sequence
  Description of Artificial Sequence:  Synthetic peptide
MIQCVFAIGDTKMSDENWAFGFKGGLPWGRPIKKDMENFKMRTMGDVELAAVVMGRNTFESLPKALEGRLNVVISTDASKPTPKAKNGDQPNVYTGIELKDLLKVLEKTQGLVSVIGGPSLIEKAVDFADRIVLTYVQRSGINDPFEYDVGISKEMIQELYFDFATKEEHNYFLDDYLISEQILERKKA

SEQ ID NO: 1810 - protein, 181 aa, Artificial Sequence
  Description of Artificial Sequence:  Synthetic peptide
MIKLIFASGENGEFGTPTGMPWPQHKQDMQEFKRLTKDNLVVMGNETFKTLGSKPLPERTNLILTNSVPYYGMDFTKDDVMFAKAHQDSFGAFLKYLDSNIEEDVFVIGGVGILVSALPYADVVFHTVFHEVTEEATVHLPFENFFDKLHDRQIFAKIQSKPSVDGKATFEIYVPQVKGHF

SEQ ID NO: 1811 - protein, 102 aa, Artificial Sequence
  Description of Artificial Sequence:  Synthetic peptide
MPRRVVLIAAVTVDGFIARNNLETIKWSKDLSLFKDQTMGWPVIMGSNTYKTIPKTLYGRECFVVTRGDNPKTILSKITKEKCFVIGGGKTYYKFIDHLTHV

SEQ ID NO: 1812 - protein, 211 aa, Artificial Sequence
  Description of Artificial Sequence:  Synthetic peptide
MKVNIILNRDNNNIIGINGELPYHIRTDLDWFKQITRGHIVVMGYNTWNSLPKKPLKDRYNIVISNNHYDQLLNDTNRPNKIFHSYQNFLNDIVFRKEYLIKFEEECKLIGYDFLKENLEIFIIGGASIYKEAYKHGINTIYETKTLLSNNWDINSTIVKSDIIIDNNYTRTYYKPLYGEISIYNGKGIKRIKEKGNYSFNIYRKNEDINT

SEQ ID NO: 1813 - protein, 154 aa, Artificial Sequence
  Description of Artificial Sequence:  Synthetic peptide
MPDRIILIAAVTVDGYIARHNLEITDWSQDLKLFKDQTMGWPIIMGSNTFKTLANELSGRENIVVSRSNNPGQILSNIKEEKCFVIGGGKTYFRFLKYITDVFITPHPHVFGSGVPLFSGENIPEISLEFERLLEVNKSRGIFQYQYKVKNIVD

SEQ ID NO: 1814 - protein, 152 aa, Artificial Sequence
  Description of Artificial Sequence:  Synthetic peptide
MPAEVILIAATTIDGFIARHSLEVTSWSEDLQLFKEQTMGHPILMGSNTFKTLSKELTGRETIVVSRNQDPKDVLNNISSTRCFIIGGGKTYYRFFDFITDIYITPHPYIFGAGVPLLDGDISKEPILKFEKLIEVDKDTGIYQYQYKVLRK

SEQ ID NO: 1815 - protein, 105 aa, Artificial Sequence
  Description of Artificial Sequence:  Synthetic peptide
MPSEIILIAAITIDGFIARRNDEITNWTKDLPLFKKQTMGYPVIMGSNTYKTLSSELEGRSVIVVGRNDNPRSIIGEIKSDRCFIAGGGKTYSRFYPFLTHLYIT

SEQ ID NO: 1816 - protein, 149 aa, Artificial Sequence
  Description of Artificial Sequence:  Synthetic peptide
MKIILICATTLDGYIARHSNEITNWTKDLKLFKKQTMGYPVIMGSNTFKTLQNELTGRNVIVFHRYDKPNKIIKELKMTYKKIFIAGGGKTNERFIEYITDMYITPHPLMFGTGIKLFGNNKIKIKTKLTKSIEIHESEGLLQYQFKIV

SEQ ID NO: 1817 - protein, 149 aa, Artificial Sequence
  Description of Artificial Sequence:  Synthetic peptide
MKIILIAATTLDGKISKATNEYVDWSLDLSLFKKQTLNHTIIIGSKTLASLRKPLLDRQVVVLDRNMNLEHVLAKISTPKCFIVGGTKTYSLFLKYITHLYLTPHPLFFGLKTKPIFENVHFNRKIKFVKKILAHKQKKIYQLQYKVYD

SEQ ID NO: 1818 - protein, 154 aa, Artificial Sequence
  Description of Artificial Sequence:  Synthetic peptide
MPDRVILIAAVTVDGYIARHNLEITNWSQDLKLFKDQTMGWPIIMGSNTFKTLANELSGRENIVVSRSDNPVQILSNINTGKCFVIGGGKTYFRFIKHITDVFITPHPHVFGSGVPLFSGENIPEISLEFERLLEVNKSRGIFQYQYKVKNIVD

SEQ ID NO: 1819 - protein, 150 aa, Artificial Sequence
  Description of Artificial Sequence:  Synthetic peptide
MPSKIILIAAVTIDGFIARSNDEITSWTKDLPLFKKQTMGYPVIMGSNTYKTLSSELGGRSVIVVGRNDNPRSIIKKIKSDRCFIAGGGKTYSRFYPFLTHLYITPHPLIFGSGVLLFSDTVNEKTLFFEKLLEVSKKEGIYQYQYKVKH

SEQ ID NO: 1820 - protein, 189 aa, Artificial Sequence
  Description of Artificial Sequence:  Synthetic peptide
MSHPQLELIVAVDSKLGFGKGGKIPWKCKEDMARFTRISKEIRVCVIGKHTYTDMRDMQLEKDGAEERIKEKGILPERESFVISSTLKQEDVIGATVVPDLRAVINLYENTDQRIAVIGGEKLYIQALSSATKLHMTIIPREFDCDRFIPVDPIQNNFHIDSSASETVEATVDETQERIHFATYVRNNQ

SEQ ID NO: 1821 - protein, 180 aa, Artificial Sequence
  Description of Artificial Sequence:  Synthetic peptide
MNISLIFANELITRAFGNQGKLPWQFIKEDMQFFQKTTENSVVVMGLNTWRSLPKMKKLGRDFIVISSTITEHEVLNNNIQIFKSFESFLEAFRDTTKPINVIGGVGLLSEAIEHASTVYMSSIHMVKPVHADVYVPVELMNKLYSDFKYPENILWVGDPIDSVYSLSIDKFVRPASLVG

SEQ ID NO: 1822 - protein, 159 aa, Artificial Sequence
  Description of Artificial Sequence:  Synthetic peptide
MTKQAIFAVAENLAFGLGGGLPWDTLKDDLQFFKRLTEGTDLVMGASTYRTLPLLPTNNRQFIVVSNTEEPSLNVHVVSPEHFKAFLSKTSRNLTIIGGSSLLTVDILSKMDKIIMTTVYGSFDADVYLPTEVVSYVTGKASNATLFNNSDAKMAVYYG

SEQ ID NO: 1823 - protein, 184 aa, Artificial Sequence
  Description of Artificial Sequence:  Synthetic peptide
MIKAVFALGVPSDFHMNGMFAFGKDNDLPWEKIPKDFTLFREKTMGCICVMGAKTFQSLPFNLPGRVMVVIGDINRSCRNKSGELPALHVNINDHDWMSTVESLYPDQDIAIIGGLGMIINNLHLCDEIHINFLMLTAEYDTINPSIYISEKSLNRYLGGKQLNSNRYSVDLPHCRSIREGVWK

SEQ ID NO: 1824 - protein, 244 aa, Artificial Sequence
  Description of Artificial Sequence:  Synthetic peptide
MKKFNIIAAINNDSIIGVKEYGTFSMPWPYLKDDMNHFRKITTDTGSIESGVNAIIVGFNTWQTLPSSYRNIRSRFNIVISRDDETDGQFHKYVKTFDEAIEFASSLTNLNEIFVIGGGVIYDLALKHKLLDKLYLTHVGSNYPIDDNVEKVVHFPLTWSKIEKMCDSNFLELDSEISKHDIGKNILLRFQEYSVKKELYWAIEYLKKNTSLDNKGIIGDKGATGSKGYSLEQHDYYSTEYFWN

SEQ ID NO: 1825 - protein, 173 aa, Artificial Sequence
  Description of Artificial Sequence:  Synthetic peptide
MTKTVLYIACSLDGKIARLDNSLDWLFAVEGDGDNGYAAFMEDVGAVIMGRKTFDEVLVLSEEYPYPAIDNYVLTRQNGKQSEHATFTNEPLDVLLERISPSIDGKIWLIGGGELIQEALRLQLIDQLELAIAPVVLGSGISLFPEGTLETRFRLTGCRPSGQFIMATYDVLK

SEQ ID NO: 1826 - protein, 173 aa, Artificial Sequence
  Description of Artificial Sequence:  Synthetic peptide
MTVKLFIASTLDGYIATKEESLQWLFDVEGEGDNGYGAFYSDIGTIIMGKKTYDWLEKEQAGQWPYSDKTSYILTHQKISSTDNIVFIDKEKLTELSVNFADTDKNIWVVGGGEVIKLFIENHWVDELQVTIAPVLLGDGISLFPSGNYKEKLQLIDTKIYGQFVELHYLVKK

SEQ ID NO: 1827 - protein, 176 aa, Artificial Sequence
  Description of Artificial Sequence:  Synthetic peptide
MYNNRKLVLYIATSLDGYIATEDDSLEWLFKTEGEGDNGYFEFYNTVDTILIGRRTYDWIIEKEKGKFPYKNKKCYVFSKSEKGKNENVEFINQDVVEFTNKIKRLDGGNIWLVGGGVLLNSFIKERLVDEFIITISPTLIGHGIPLFKKNDFELELKLKGIRRFNQFVELHYEVK

SEQ ID NO: 1828 - protein, 174 aa, Artificial Sequence
  Description of Artificial Sequence:  Synthetic peptide
MSEKQVALYIAVSLDGYIADENGSVEWLESVDSEGDAGYEAFFDNVDTVVMGRTTYQQIFSLTDTFPYSKKDVYVFSNTKAGTKDEYADFVAGTVDTWLNNIDGEKVWLVGGAQLVKQFLKEKAIDRFVITIAPIILGKGIPLFEEDQEHALELEEVTRFGQFAQLTYKNLEEK

SEQ ID NO: 1829 - protein, 188 aa, Artificial Sequence
  Description of Artificial Sequence:  Synthetic peptide
MKENNPRIKLYIACSLDGFIARKGGSVDWLTEYENSSETDYGYSEFYASIGTVLIGRKTYEQVLDFGVWPYGEKKTYVFTRQKEPLRREKNVEFVSGNVGEFVRRLKENTDENIWLVGGSQLIRVFLEEDLVQDMIVFVVPVILGSGIPLFDRIGKEVRLRMIDTERYESGLVKLEYEIEGRHKKIAN

SEQ ID NO: 1830 - protein, 179 aa, Artificial Sequence
  Description of Artificial Sequence:  Synthetic peptide
MDKKRKVKLFIATSLDGYIATKDESLQWLEDIEGEGDNGYLRFYEEIDTVIMGNKTYQWLESQNVNEFPYKGKDCYVFSRKESGRNENVIFVNDDVKRFIQMLQKKEGRDIWIVGGGELLTSFIEQDLIDEYIITIAPIILGEGIPLFKECSSTINLSLIGTQKFNQFIELHYERTLTN

SEQ ID NO: 1831 - protein, 177 aa, Artificial Sequence
  Description of Artificial Sequence:  Synthetic peptide
MTKVTLYIAASLDGYIARSDGGIDWLSILDIEGEDYGYGTFYESIDAIVLGSNTYEVGLGFDEWPYPGKKSFVFTKRHLQSDREDVVFVSDTVKNALANIEAQGFENIWLVGGGALINSFLQHSLIDEYIISTIPTILGSGIQLFPPPTPEEKLELINSKQYSSGLLQSHYRRTGKL

SEQ ID NO: 1832 - protein, 174 aa, Artificial Sequence
  Description of Artificial Sequence:  Synthetic peptide
MERKTVLYIAVSLDGMIAKEDGSIDWLDEFEGEGDNGYSDFYQTVDTVILGRSTYEHVKVLTPVFPYQDKTCYVFTGSPDSYQDEHVTFINEGARAFTARLKQEKGSNIWIAGGAELVNDFMKEDAIDEFIITVIPVVLGSGIPLFHELTNETKLRLKGTKQFGQAVQLHYVRA

SEQ ID NO: 1833 - protein, 180 aa, Artificial Sequence
  Description of Artificial Sequence:  Synthetic peptide
MAREVILFIAASIDGFIADKAGGVAWLEENIRGDEEDRSYDEMYEKIDTVVMGRTTYDQVTQELSPDVYFYEDKHSYIITSHPEPSTASRTFTKEDPVTLIRRLKEEDGAGIWIVGGPKVVQPLLAADLIDTFILTTIPLFLGEGIALYETMAQSIPVRLKQVYQKNELVYSIYQRENKN

SEQ ID NO: 1834 - protein, 173 aa, Artificial Sequence
  Description of Artificial Sequence:  Synthetic peptide
MSREIVLFIAASLDGYIAKENDDLEWLMETEGEGDNGYTEMYETIDTIIMGKKTYDYVVEHTETFPYLDKACYVFSRSEKGSDGNVEFVNEDVVEFTKRLKAQEGSKIWMVGGGELLREFFKNNLIDEYVVTITPHILGSGVPLFQDKNPEINLTLTDTKRFGQFVNLYYKVK

SEQ ID NO: 1835 - protein, 180 aa, Artificial Sequence
  Description of Artificial Sequence:  Synthetic peptide
MKPHLTYYVAASLDGFIARPDGSVDWLDRFAEGGNDHGYKSFYQGIDGLLMGRGTYDIVRGFGDWPYPGKPCQVLTRNPQESAAEGVELRHVTPQEGLARLGEQGCRRIWLAGGGSLAGSCLAAGLLDEVIVSVIPQLLGAGIPLFAGGRERRLQLLEQHGYNSGIVQMRYQVIAEDDPQ

SEQ ID NO: 1836 - protein, 181 aa, Artificial Sequence
  Description of Artificial Sequence:  Synthetic peptide
MKATVYIATSVDGFIARNNGGIDWLPSAGDTDSSEDYGYQEFIDSVDALVMGRNTYELALSFDSWPYGEKPVFVLSSRKVDIPEDITKIVESMSVPPREVVCRLSKRGFQHLYIDGGKTIQGFLSEGLIQQLIITKVPILIGEGIPLFSALPHDVRLHHLETRQFENGLVQSKYKVIEDIA

SEQ ID NO: 1837 - protein, 175 aa, Artificial Sequence
  Description of Artificial Sequence:  Synthetic peptide
MDVIYYVAASLDGYIATPDGGVAWLAPFENAGEDYGYAEFYASVDALLMGSATYEKTLSFGAWPYEGKPCRVFSRQEHAVPTHDVVITDATPDDVLHSLLRNGCRRAWLVGGGVLAASFLQRRLISEYIVSIVPVILGGGIPMISPNRIRESLTLLETKVCTGGIVQVRYRSEGH

SEQ ID NO: 1838 - protein, 173 aa, Artificial Sequence
  Description of Artificial Sequence:  Synthetic peptide
MSREIVLFIAASLDGYIAKEDDDLQWLMETEGEGDNGYTEMYETIDTIIMGKRTYDYVVEHMETFPYVDKKCYVFSNSEKGSNEYVEFVSEDVVEFTKRLKEQEGSKIWMVGGGSLLREFFKNNLIDEYVVTITPHILGSGVPLFQDKNPEIHLTLTDTKRFGQFVNLYYKVR

SEQ ID NO: 1839 - protein, 177 aa, Artificial Sequence
  Description of Artificial Sequence:  Synthetic peptide
MKVKVFIATSLDGFIAKKDGDISWLTSATDSTDDHGYSAFMSGIDLILMGRATLEKLLSFGIEWPYPVKTVVLSHQLSSADLPPELQDKVEIRQGAIADILHQLKQQGYKAVYLDGGNIIQQGLRHQLVDELTLTRIPVLIGEGIPLFGALPADLKLQHLETRVYQSGFVQSRYSCK

SEQ ID NO: 1840 - protein, 176 aa, Artificial Sequence
  Description of Artificial Sequence:  Synthetic peptide
MRKVILYIATSLDGYIAKPNDDLGFLSIVEQEGQDYGYADFVKTVDAVIVGRKTYDKVISMGFDFPHADKDAYIITRTPRPSIGSIKFYTDDLKSLVNKLKSENGKNIFCDGGAEIVSELLKDDLIDEFIISVIPILVGNGTKLFKDGRPEQILELISTKQFEKGLTQLHYKRADK

SEQ ID NO: 1841 - protein, 177 aa, Artificial Sequence
  Description of Artificial Sequence:  Synthetic peptide
MARKVILFIAMSIDNYIADDQGAVDWLEKNVHGTESDDSYEKMYSKIDTVIMGRTTYEQVTQKLSPEKYVYADRQTYIVTSHLGEDTDKIKYWKQSPVELVKRIQKEKGKDVWIVGGAKLIDPLVQANLIDTYILTTVPIFLGSGIRLFDRLEEQVPVRLIDVYQKNELVYSIYQRG

SEQ ID NO: 1842 - protein, 181 aa, Artificial Sequence
  Description of Artificial Sequence:  Synthetic peptide
MKPKISVFIATSLDGYIARNDGSIDWLIEANSLASPGEDCGYRSFIATIDTIIMGRYSYEKVITFDEWPYASIPVIVLSSKPIQIPEHLRHIISVSNQSPIELASELAHYGIQHVYLDGGITIQRFLQNNLIDEITITMIPVLIGSGRPLFGFLENDIKLKHLSTTSYPGGFVQIKYHIGE

SEQ ID NO: 1843 - protein, 194 aa, Artificial Sequence
  Description of Artificial Sequence:  Synthetic peptide
MGAITPPSSILLSTMTERRLILFIATSLDGYIARRNEGIDWLFDDADYGYSEFYSQIDTVLMGRKTYELSMSLSDDPYPGCQIYVFSRSLTETADPAITVVQGNPALWVSQLKQQPGRNFWLVGGGQLVQQCLAADCLDELILSIHPILLGNGIPLFPSPFPEQRWQLVKTQSYPTGLLQCTYHRDRSVPSTEP

SEQ ID NO: 1844 - protein, 182 aa, Artificial Sequence
  Description of Artificial Sequence:  Synthetic peptide
MAFGKVFIATSVDGFIARNDGAIDWLPSGESGEDYGYGAFMASVDGIVMGRATYDSVLGFTPWPFDKPVVVLSRTLSTQDVPQRLEGKVRISALQPVALVAQLRAEGWRTAYIDGGTLIQAFLQAGLIDEMTLTRVPVLLGTGRPLFGALPRDLHLRCVDSRWYRDGLVSTRYRVERGAVHD

SEQ ID NO: 1845 - protein, 172 aa, Artificial Sequence
  Description of Artificial Sequence:  Synthetic peptide
MRKIILFIASSLDGYIARDSGDIDWLFTDQDYGYTEFIAQIDTLIMGNKTYQQILTFGEYPYQDQEVFVFSKTYSGETNNGAKYINSDWEDFIKTLRTSNGRDIWLVGGAQLIHFFLKHGFIDELILSIHPIILGSGIPLILKDPTIETKLQLQDVKSFDTGLVQIFYNLTY

SEQ ID NO: 1846 - protein, 161 aa, Artificial Sequence
  Description of Artificial Sequence:  Synthetic peptide
MDGYIAKEDDDLQWLMETEGEGDNGYTEMYETIDTIIMGKRTYDYVVEHMETFPYLDKKCYVFSNSQKGSNEHVDFVNEEVVEFTKRLKEQEGSKIWMVGGGSLLREFFKNNLIDEYVVTITPHILGSGVPLFQDKNPEINLTLTDTKRFGQFVNLYYKVK

SEQ ID NO: 1847 - protein, 179 aa, Artificial Sequence
  Description of Artificial Sequence:  Synthetic peptide
MTEPEHRKVILYLAQSLDGFIAEKDGSTAWLSALNSSESDAAIQSFYQGVDTIIMGRKTYEQCIKLAGTYPYQEKQSYVFSKTLHDTADRTNVVTGNVPEFVRQLKAQDGGNIWLVGGAETFTMLLKAQLVDELIITIAPVLLGDGISLISTHLTDMPLELSKTRQLGQFVELTYKINY

SEQ ID NO: 1848 - protein, 175 aa, Artificial Sequence
  Description of Artificial Sequence:  Synthetic peptide
MEIVYYVAASLDGYIADPQGKVDWLASVADENEDYGYDTFYQGVDALVMGSKTYLKVLELGAWPYEGKPVWVFSRQEDLKLAPGVERCAGDPSTIVAHFRALDYKRVWLVGGGELLASFQEEDLVDEYIISYVPVLLGRGIPLFPPVDACARLDFQLAETFSSGLVQMRYKRLCD

SEQ ID NO: 1849 - protein, 185 aa, Artificial Sequence
  Description of Artificial Sequence:  Synthetic peptide
MAKVIAGATVSLDGFVQDAAGSSAALYADFDTLVGSDYMRRLQDETGAVLMGRRTFDGAEDPDSYAEDYEFQAPIFVVTHHPLPVPPRRNERLWIEFVTDGVEEAVRRAVEAAGDRDVTFVGGADLFRQLLAADLVDELAVDVMPVLLGGGVRLFDGGVPATLEKVSVDEVGVRTALRYRVVRDS

SEQ ID NO: 1850 - protein, 188 aa, Artificial Sequence
  Description of Artificial Sequence:  Synthetic peptide
MTNNLKQRRIILDLAVTLDGFIEGKNGEVDWCIMDPDMGFTDFLNQIDTILYGRKSFDLWGQYIPKNEDPDTEKELWKLVHSKKKYVFSRTQNEIDNQAIFINDNILEEVNKLKKNPGKDIWLYGGASLITTFINLGLVDEFRLSIHPVVLGEGKPLFIDVKQRINLKMVNTRTFSSGVVQIVYHWNG

SEQ ID NO: 1851 - protein, 177 aa, Artificial Sequence
  Description of Artificial Sequence:  Synthetic peptide
MSNIVYIATSLDGYIAGPNNEMDWLHQVPNPDGSDFGFADFMASVDALVMGRNTFEMVLSFGVEWPYNKPVFVLSNTLKSVPEGYQDKVFLVQGALPTMVAQLHQQGYQRLYIDGGKTVQSFLAEDLIDEMIITTIPVLLGAGIPLFGRLPKALNFKHIHAERLADHMVKNHYVRVR

SEQ ID NO: 1852 - protein, 179 aa, Artificial Sequence
  Description of Artificial Sequence:  Synthetic peptide
MRKVQFYGAISIDGCLATKDNRLDWLFKTAGANDAPTEAFMQQVDTAIMGRHTYEYTMEQTTDQLINPYNPATHNIVMTSHPHTGDERTQFTNTPVTKIVEDLRRTAGKNIWIVGGAGVLMPLLAADLVDELYIQIAPVILGDGIPLFKAIDQQQRFELVDTNRYGQLAEVHYQRLTTE

SEQ ID NO: 1853 - protein, 177 aa, Artificial Sequence
  Description of Artificial Sequence:  Synthetic peptide
MANIVFIATSLDGYIADKQGKLDWLQSVPNPDNIDTGFVPLMERIDGLVMGRNTFDVVLSFGCNWPYSKPVFVLSNTMTEVPQGYEDKVFLVKGELKDVLADLNTKGFNELYIDGGVTIQNFLKEDLIDEMVITRFPILLGGGAPLFGDLEQPLNFKATKSDVVLDTLVQTTYVRER

SEQ ID NO: 1854 - protein, 183 aa, Artificial Sequence
  Description of Artificial Sequence:  Synthetic peptide
MKASVFIAATLDGYIATPDGDIDFLNQHPSTNPDEDFGYHAFIDTIDAIVMGRKSFEKVLSFDCDWPYMNIPVFVLSRSGITVPSALSEHVQVLNGNTANINKQLRERGFKHLYIDGGQTIQGFLAAGLIQELTLTRIPTLLGKGIPLFSDVPQAIPLMPIHTQQYDNGYVQTRYRVIDNTAL

SEQ ID NO: 1855 - protein, 177 aa, Artificial Sequence
  Description of Artificial Sequence:  Synthetic peptide
MSNIVYIATSLDGYIADKNGSIDWLHTTPSPDGSDLGYSNFIERIDALVMGRNTLDMVLSFDCDWPYTRPVFVLSNTMTRIPEGYEDKIFLVKGPLTTVVASLNEQGYNNLYIDGGITIQNFLKEDLIDEMIITTIPILLGGGSPLFGELVTPQSFELTGSEILINQLVQSHFTRIR

SEQ ID NO: 1856 - protein, 186 aa, Artificial Sequence
  Description of Artificial Sequence:  Synthetic peptide
MSASQQSLRAVVFLGLSVDGRIARPDGDLEWLTSRGEAAGDAGFTPFVESVDAVMMGRKTYEAIASIQEWPYLGRPIHVISTTLDADADPRIIVHRSPEAAIDAAELSGCKRVYVDGGATVRWFLAAKLVDELTLSQVPVLIGDGPSLFGSLGGDVDLEHVRTTVLDGGMVQTTYRVVDGPTPHTS

SEQ ID NO: 1857 - protein, 177 aa, Artificial Sequence
  Description of Artificial Sequence:  Synthetic peptide
MRPRVSVFLALSLDGFIAGENDDLSWLEPFSSDSPDDTGYTALMNGIDVIVMGRNTYDTVINFDPWPYAGKRMVVMTRRELASRHGEEPFDGALATLLDRLAAQGHRHVYLDGGLTAREGIKAGVVDRITLSWVPIVLGKGIPLFGAELPQTLLRLDDTKRLPSGLMQATYVPVMQD

SEQ ID NO: 1858 - protein, 212 aa, Artificial Sequence
  Description of Artificial Sequence:  Synthetic peptide
MTSAPPSSTSPEIPPATSPAVVTLAAAAPPGAGSPTRAAPFTGAVFIATSLDGYIARPDGDIDWLTERGADAGDTGYESFIDGIDALVMGRGTYEKVLTFDAWPYPGRTVFLLSRRAEPGVDDRVRVVRDVAEAVDAISACGARRVYVDGGQVVQSFLAAGLVQEITITTVPVLLGEGLPLFGRLGADVDLQHRATTVLGAGFVQSTYAVRR

SEQ ID NO: 1859 - protein, 177 aa, Artificial Sequence
  Description of Artificial Sequence:  Synthetic peptide
MTTAHVFIATSLDGFIARPDGDIGWLLQRDDPAEDHGYMDFIADKDAIVMGRGTYEKVLTLGDWAYDRPVLVLSRQLAGTPVPAALEGKVRFASLSPRDTLERLAAEGVRRVYVDGGQVVQSFLRDGLIADLVVTTVPVLIGAGRPLFGALPRDVDLALVSSRSFPSGLVQSTYRVA

SEQ ID NO: 1860 - protein, 199 aa, Artificial Sequence
  Description of Artificial Sequence:  Synthetic peptide
MAIAAEPAPAKFEFDRNERRQMVSGHVFIATSLDGYIARADGDIGWLLERDDPAEDHGYAEFIADKDMIVMGRGSFEKVLTMGPWAYDRPVLVLSRQLAGKPVPEPLQGKVRFSDCAPRDAMAELAAEGAHRVYVDGGQVVQSFLREGLITDLVVTTVPVLIGTGRPLFGALPRDVDLALESSRHFPSGLVQSKYRVLG

SEQ ID NO: 1861 - protein, 178 aa, Artificial Sequence
  Description of Artificial Sequence:  Synthetic peptide
MANIVFIATSLDGYIADKRGKLDWLHSVPNPNNVDTGFVALMERVDGLVMGRNTLDMVLSFDCDWPYSKPVFVLSNTMTEVPQGYEDKVFLVKGKLVDIIADLNAKGFNELYIDGGVTIQNFLKEDLIDEMVITRFPILLGGGVPLFGELESSLSFNVIKSEVVLDSLTQTTYHRKRA

SEQ ID NO: 1862 - protein, 189 aa, Artificial Sequence
  Description of Artificial Sequence:  Synthetic peptide
MSNNVKQRRIILDLATTLDGFIEGKNGEVDWCIMDADMGFTNFLNEIDTILYGRKSYDLWGQYIPQDEDSDDEKEVWKLIHSKEKYVFSRTQIATNNQATFINENILEEVNKLKNKPGKDIWLYGGASLITTFINLGLVDEFRLSIHPVILGEGKPLFNDIKQRVNLKMVNTRTFSSGVVQLIYHWNGN

SEQ ID NO: 1863 - protein, 181 aa, Artificial Sequence
  Description of Artificial Sequence:  Synthetic peptide
MRKVIMWDMVSVDGFFEAPGHDIGWFVFEEELDAYIRETQFEAGTLLFGRTTYELMAAYWPSSRDHIAAFMNGVEKYVFSRTLRSADWNNTTLVSGDAADEVRRLKEREGGAIFIFGSADFASTLIAQGLVDEYRLGINPVLLGKGTPLFQNVPERTKLDLTHVRPLKSGVVILHYRPESA

SEQ ID NO: 1864 - protein, 197 aa, Artificial Sequence
  Description of Artificial Sequence:  Synthetic peptide
MSKVLSALSVSVDGFITGREPGPGHGLGDGGTLFDWYTSGDVRSQEFDFFHLSAASARIFDSLASRVGASLAGRKTYEDSERFGGGGPHPTAPLVVVSHRPIPEASSAQTVITTGIEDAVAAAKKVAGDKGVALMGGGVVTTALAAGLVDELVLHQVPVLLGAGRPYFQELPHHIRLRLIEAVPAPGVTHLHYAVEN

SEQ ID NO: 1865 - protein, 183 aa, Artificial Sequence
  Description of Artificial Sequence:  Synthetic peptide
MRKLVYGFSVSLDGYINDRAGAIDWTEPDDELHQFHNDRFREIEISLHGRRLYELMAEYWPHVPADAPPIEREFGRLWTEKPKVVFSRTVPEVHWNSTLISTNAAEEVGRLKAAGDGVIEVGGATLAASLIPHGLVDEYQMFVSPVVLGGGTPYFPVLDTRLRLRLAETRHFKTAVLLRYVTE

SEQ ID NO: 1866 - protein, 135 aa, Artificial Sequence
  Description of Artificial Sequence:  Synthetic peptide
MIDVRCICAIGQRGQLGLNGHLPWEGNTDPLFVEDVTRFFALTMGHVLIAGPKTVASVPEFAFKDRTIDVIRSHEDPEAVLKRYPGRRIFVGGGIAVWNVYAKYIQHWDVTRLPYDGEADRWFDPAWLVGGPLRS

SEQ ID NO: 1867 - protein, 222 aa, Artificial Sequence
  Description of Artificial Sequence:  Synthetic peptide
MRPYVYLMAAVTIDGRIASKSGYSRLSCPHDLKRLHALRAEVDAVIVGANTAIIDNPRLTVRYAAGRNPTRVLIDGALRAPTTLRIFDKTAPTIVYTTNLAPAEKINELRRLGIEVVVFPSHRVDPASVLSDLYNRGVRKVLIEGGGRTNWEFISKCLVDEVIVTVTPYVFGSGVSLVEGEGFKDIEEMPFNLKLLGVKLCECGKEVVVKYAVECKKVDTKY

SEQ ID NO: 1868 - protein, 104 aa, Artificial Sequence
  Description of Artificial Sequence:  Synthetic peptide
YITPVNSLEKHSWYHGPVSRNAAEYLLSSGINGSFLVRESESSPGQRSISLRYEGRVYHYRINTASDGKLYVSSESRFNTLAELVHHHSTVADGLITTLHYPAP

SEQ ID NO: 1869 - protein, 97 aa, Artificial Sequence
  Description of Artificial Sequence:  Synthetic peptide
LSLMPWFHGKISGQEAVQQLQPPEDGLFLVRESARHPGDYVLCVSFGRDVIHYRVLHRDGHLTIDEAVFFCNLMDMVEHYSKDKGAICTKLVRPKRK

SEQ ID NO: 1870 - protein, 105 aa, Artificial Sequence
  Description of Artificial Sequence:  Synthetic peptide
LEPEPWFFKNLSRKDAERQLLAPGNTHGSFLIRESESTAGSFSLSVRDFDQNQGEVVKHYKIRNLDNGGFYISPRITFPGLHELVRHYTNASDGLCTRLSRPCQT

SEQ ID NO: 1871 - protein, 104 aa, Artificial Sequence [sequence omitted]

SEQ ID NO: 1872 - protein, 105 aa, Artificial Sequence
  Description of Artificial Sequence:  Synthetic peptide
GSPGIHESKEWYHASLTRAQAEHMLMRVPRDGAFLVRKRNEPNSYAISFRAEGKIKHCRVQQEGQTVMLGNSEFDSLVDLISYYEKHPLYRKMKLRYPINEENSS

SEQ ID NO: 1873 - protein, 103 aa, Artificial Sequence
  Description of Artificial Sequence:  Synthetic peptide
MDLPYYHGCLTKRECEALLLKGGVDGNFLIRDSESVPGALCLCVSFKKLVYSYRIFREKHGYYRIETDAHTPRTIFPNLQELVSKYGKPGQGLVVHLSNPIMR

SEQ ID NO: 1874 - protein, 106 aa, Artificial Sequence
  Description of Artificial Sequence:  Synthetic peptide
KLIATTAHERMPWYHSSLTREEAERKLYSGAQTDGKFLLRPRKEQGTYALSLIYGKTVYHYLISQDKAGKYCIPEGTKFDTLWQLVEYLKLKADGLIYCLKEACPN

SEQ ID NO: 1875 - protein, 106 aa, Artificial Sequence
  Description of Artificial Sequence:  Synthetic peptide
AEQLRGEPWFHGKLSRREAEALLQLNGDFLVRESTTTPGQYVLTGSQSGQPKHLLLVDPEGVVRTKDHRFESVSHLISYHMDNHLPIISAGSELCLQQPVERKLLE

SEQ ID NO: 1876 - protein, 110 aa, Artificial Sequence
  Description of Artificial Sequence:  Synthetic peptide
  MOD_RES (1)..(110): x = any natural occuring amino acid
XNNLETYEWYNKSISRDKAEKLLLDTGKEGAFMVRDSRTPGTYTVSVFTKAIISENPCIKHYHIKETNDSPKRYYVAEKYVFDSIPLLIQYHQYNGGGLVTRLRYPVCGX

SEQ ID NO: 1877 - protein, 100 aa, Artificial Sequence
  Description of Artificial Sequence:  Synthetic peptide
SEPWFFGCISRSEAVRRLQAEGNATGAFLIRVSEKPSADYVLSVRDTQAVRHYKIWRRAGGRLHLNEAVSFLSLPELVNYHRAQSLSHGLRLAAPCRKHE

SEQ ID NO: 1878 - protein, 108 aa, Artificial Sequence
  Description of Artificial Sequence:  Synthetic peptide
SGEVQKPLHEQLWYHGAIPRAEVAELLVHSGDFLVRESQGKQEYVLSVLWDGLPRHFIIQSLDNLYRLEGEGFPSIPLLIDHLLSTQQPLTKKSGVVLHRAVPSGPSS

SEQ ID NO: 1879 - protein, 100 aa, Artificial Sequence
  Description of Artificial Sequence:  Synthetic peptide
GSFIDIEFPEWFHEGLSRHQAENLLMGKDIGFFIIRASQSSPGDFSISVRHEDDVQHFKVMRDTKGNYFLWTEKFPSLNKLVDYYRTTSISKQKQVFLRD

SEQ ID NO: 1880 - protein, 109 aa, Artificial Sequence
  Description of Artificial Sequence:  Synthetic peptide
SWYWGRLSRQEAVALLQGQRHGVFLVRDSSTSPGDYVLSVSENSRVSHYIINSSGPRPPVPPSPAQPPPGVSPSRLRIGDQEFDSLPALLEFYKIHYLDTTTLIEPVSR

SEQ ID NO: 1881 - protein, 112 aa, Artificial Sequence
  Description of Artificial Sequence:  Synthetic peptide
GSPIPHHDEKTWNVGSSNRNKAENLLRGKRDGTFLVRESSKQGCYACSVVVDGEVKHCVINKTATGYGFAEPYNLYSSLKELVLHYQHTSLVQHNDSLNVTLAYPVYAQQRR

SEQ ID NO: 1882 - protein, 114 aa, Artificial Sequence
  Description of Artificial Sequence:  Synthetic peptide
TSLSAAIHRTQLWFHGRISREESQRLIGQQGLVDGLFLVRESQRNPQGFVLSLCHLQKVKHYLILPSEEEGRLYFSMDDGQTRFTDLLQLVEFHQLNRGILPCLLRHCCTRVAL

SEQ ID NO: 1883 - protein, 112 aa, Artificial Sequence
  Description of Artificial Sequence:  Synthetic peptide
REVENRPKYYGREFHGIISREQADELLGGVEGAYILRESQRQPGCYTLALRFGNQTLNYRLFHDGKHFVGEKRFESIHDLVTDGLITLYIETKAAEYISKMTTNPIYEHIGY

SEQ ID NO: 1884 - protein, 110 aa, Artificial Sequence
  Description of Artificial Sequence:  Synthetic peptide
IKKHLLPLWNDGCIMGFISKERERALLKDQQPGTFLLRFSESSREGAITFTWVERSQNGGEPDFHAVEPYTKKELSAVTFPDIIRNYKVMAAENIPENPLKYLYPNIDKD

SEQ ID NO: 1885 - protein, 101 aa, Artificial Sequence
  Description of Artificial Sequence:  Synthetic peptide
  MOD_RES (86): x = any natural occuring amino acid
GSHMELELSDYPWFHGTLSRVKAAQLVLAGGPRSHGLFVIRQSETRPGECVLTFNFQGKAKHLRLSLNGHGQCHVQHLWFQSVFDXLRHFHTHPIPLESGG

SEQ ID NO: 1886 - protein, 99 aa, Artificial Sequence
  Description of Artificial Sequence:  Synthetic peptide
YQRHISTLWQEGIIYGYMGRQEVNDALQNQDPGTFIIRFSERNPGQFGIAYIGVEMPARIKHYLVQPNDTAAAKKTFPDFLSEHSQFVNLLQWTKDTNG

SEQ ID NO: 1887 - protein, 98 aa, Artificial Sequence
  Description of Artificial Sequence:  Synthetic peptide
REWYYGNVTRHQAECALNERGVEGDFLIRDSESSPSDFSVSLKASGKNKHFKVQLVDNVYCIGQRRFHTMDELVEHYKKAPIFTSEHGEKLYLVRALQ

SEQ ID NO: 1888 - protein, 111 aa, Artificial Sequence
  Description of Artificial Sequence:  Synthetic peptide
GMNNNMSLQDAEWYWGDISREEVNEKLRDTADGTFLVRDASTKMHGDYTLTLRKGGNNKSIKIFHRDGKYGFSDPLTFNSVVELINHYRNESLAQYNPKLDVKLLYPVSKY

SEQ ID NO: 1889 - protein, 109 aa, Artificial Sequence
  Description of Artificial Sequence:  Synthetic peptide
VKKYILALWNEGYIMGFISKERERAILSTKPPGTFLLRFSESSKEGGVTFTWVEKDISGSTQIQSVEPYTKQQLNNMSFAEIIMGYKIMDATNILVSPLVYLYPDIPKE

SEQ ID NO: 1890 - protein, 105 aa, Artificial Sequence
  Description of Artificial Sequence:  Synthetic peptide
SANHLPFFFGNITREEAEDYLVQGGMSDGLYLLRQSRNYLGGFALSVAHGRKAHHYTIERELNGTYAIAGGRTHASPADLCHYHSQESDGLVCLLKKPFNRPQGV

SEQ ID NO: 1891 - protein, 116 aa, Artificial Sequence
  Description of Artificial Sequence:  Synthetic peptide
YVARVDSLETEEWFFKGISRKDAERQLLAPGNMLGSFMIRDSETTKGSYSLSVRDYDPRQGDTVKHYKIRTLDNGGFYISPRSTFSTLQELVDHYKKGNDGLCQKLSVPCMSSKPQ

SEQ ID NO: 1892 - protein, 109 aa, Artificial Sequence
  Description of Artificial Sequence:  Synthetic peptide
GSAEEWYFGKITRRESESLLLNPENPRGTFLVRESETTKGAYCLSVSDFDNAKGLNVKHYKIRKLDSGGFYITSRTQFSSLQQLVAYYSKHADGLCHRLTNVCPTSKEF

SEQ ID NO: 1893 - protein, 113 aa, Artificial Sequence
  Description of Artificial Sequence:  Synthetic peptide
SVAPVETLEVEKWFFRTISRKDAERQLLAPMNKAGSFLIRESESNKGAFSLSVKDITTQGEVVKHYKIRSLDNGGYYISPRITFPTLQALVQHYSKKGDGLCQKLTLPCVNLA

SEQ ID NO: 1894 - protein, 110 aa, Artificial Sequence
  Description of Artificial Sequence:  Synthetic peptide
RRASVGSHEKMPWFHGKISREESEQIVLIGSKTNGKFLIRARDNNGSYALCLLHEGKVLHYRIDKDKTGKLSIPEGKKFDTLWQLVEHYSYKADGLLRVLTVPCQKIGTQ

SEQ ID NO: 1895 - protein, 110 aa, Artificial Sequence
  Description of Artificial Sequence:  Synthetic peptide
YVAPVDSIQAEEWYFGKLGRKDAERQLLSFGNPRGTFLIRESETTKGAYSLSIRDWDDMKGDHVKHYKIRKLDNGGYYITTRAQFETLQQLVQHYSERAAGLSSRLVVPS

SEQ ID NO: 1896 - protein, 108 aa, Artificial Sequence
  Description of Artificial Sequence:  Synthetic peptide
GVKAGTKLSLMPWFHGKITREQAERLLYPPETGLFLVRESTNYPGDYTLCVSCEGKVEHYRIMYHASKLSIDEEVYFENLMQLVEHYTTDADGLCTRLIKPKVMEGTV

SEQ ID NO: 1897 - protein, 105 aa, Artificial Sequence
  Description of Artificial Sequence:  Synthetic peptide
IHRTQHWFHGRISREESHRIIKQQGLVDGLFLLRDSQSNPKAFVLTLCHHQKIKNFQILPCEDDGQTFFSLDDGNTKFSDLIQLVDFYQLNKGVLPCKLKHHCIR

SEQ ID NO: 1898 - protein, 111 aa, Artificial Sequence
  Description of Artificial Sequence:  Synthetic peptide
PRGSHMIHRSQPWFHHKISRDEAQRLIIQQGLVDGVFLVRDSQSNPKTFVLSMSHGQKIKHFQIIPVEDDGEMFHTLDDGHTRFTDLIQLVEFYQLNKGVLPCKLKHYCAR

SEQ ID NO: 1899 - protein, 111 aa, Artificial Sequence
  Description of Artificial Sequence:  Synthetic peptide
IPKNYIEMKPHPWFFGKIPRAKAEEMLSKQRHDGAFLIRESESAPGDFSLSVKFGNDVQHFKVLRDGAGKYFLWVVKFNSLNELVDYHRSTSVSRNQQIFLRDIEQVPQQP

SEQ ID NO: 1900 - protein, 111 aa, Artificial Sequence
  Description of Artificial Sequence:  Synthetic peptide
GSHMPDPAAHLPFFYGSISRAEAEEHLKLAGMADGLFLLRQCLRSLGGYVLSLVHDVRFHHFPIERQLNGTYAIAGGKAHCGPAELCEFYSRDPDGLPCNLRKPCNRPSGL

SEQ ID NO: 1901 - protein, 117 aa, Artificial Sequence
  Description of Artificial Sequence:  Synthetic peptide
GSSGSSGWYHGHMSGGQAETLLQAKGEPWTFLVRESLSQPGDFVLSVLSDQPKAGPGSPLRVTHIKVMCEGGRYTVGGLETFDSLTDLVEHFKKTGIEEASGAFVYLRQPYYSGPSS

SEQ ID NO: 1902 - protein, 96 aa, Artificial Sequence
  Description of Artificial Sequence:  Synthetic peptide
LKKHHKPHWNDGAILGFVNKQQAHDLLINKPDGTFLLRFSDSEIGGITIAWKFDSPDRNLWNLKPFTTRDFSIRSLADRLGDLNYLIYVFPDRPKD

SEQ ID NO: 1903 - protein, 113 aa, Artificial Sequence
  Description of Artificial Sequence:  Synthetic peptide
WEGPPQDLSVHLWYAGPMERAGAESILANRSDGTFLVRQRVKDAAEFAISIKYNVEVKHIKIMTAEGLYRITEKKAFRGLTELVEFYQQNSLKDCFKSLDTTLQFPFKEPEKR

SEQ ID NO: 1904 - protein, 110 aa, Artificial Sequence
  Description of Artificial Sequence:  Synthetic peptide
SGGQLAQDGVPEWFHGAISREDAENLLESQPLGSFLIRVSHSHVGYTLSYKAQSSCCHFMVKLLDDGTFMIPGEKVAHTSLDALVTFHQQKPIEPRRELLTQPCRQKDSG

SEQ ID NO: 1905 - protein, 108 aa, Artificial Sequence
  Description of Artificial Sequence:  Synthetic peptide
MKSRRWFHPNITGVEAENLLLTRGVDGSFLARPSKSNPGDLTLSVRRNGAVTHIKIQNTGDYYDLYGGEKFATLAELVQYYMEHHGQLKEKNGDVIELKYPLNCADPT

SEQ ID NO: 1906 - protein, 98 aa, Artificial Sequence
  Description of Artificial Sequence:  Synthetic peptide
SEVDNRPKYYGREYHGMISREEADQLLSQAEGSYLIRESQRQPGTYTLALRFGNQTRNFRLYHDGKHFVGEKRFESIHDLVTDALITLYVETKAAEYI

SEQ ID NO: 1907 - protein, 110 aa, Artificial Sequence
  Description of Artificial Sequence:  Synthetic peptide
LPHVKQQLRSEDCYHGKLSRKAAESLLVKDGDFLVRESATSPGQYVLSGLQGGQAKHLLLVDPEGKVRTKDHVFDNVGHLIRYHMDNSLPIISSGSEVSLKQPVRKDNNP

SEQ ID NO: 1908 - protein, 108 aa, Artificial Sequence
  Description of Artificial Sequence:  Synthetic peptide
MESLSVYHGAISREMCEMRLNEAGKDGSYLIRDSESVAGAYCLCVLCKGFVYTYRLQKDSAGSWAAETAPGQTKRLFRKVKNLISAFEKPGQGIAIPLLYPVTIQKSY

SEQ ID NO: 1909 - protein, 117 aa, Artificial Sequence
  Description of Artificial Sequence:  Synthetic peptide
VPKNYIRVKPHPWYSGRISRQLAEETLMKRNHLGAFLIRESESSPGEFSVSVNYGDQVQHFKVLREASGKYFLWEEKFNSLNELVDFYRTTTIAKRRQIFLCDEQPLIKPSRACFAQ

SEQ ID NO: 1910 - protein, 113 aa, Artificial Sequence
  Description of Artificial Sequence:  Synthetic peptide
PPSREIDYTVYPWFAGNMERQQTDNLLKTHVSGTYLIRERPAEAERFAISIKFNEEVKHIKVVEKDNWIHITEAKKFESLLELVEYYQNHSLKESFKQLDTTLKYPYKSRERS

SEQ ID NO: 1911 - protein, 111 aa, Artificial Sequence
  Description of Artificial Sequence:  Synthetic peptide
VALLKDEFANYKWYYGNINRQKAEKLLLSSENKTGSFLVRISESHSDEYTISARSENSVFHFRIHRSPIGAYFVSEKISFGTLDELIRYYQQNSRSLGCHIDQPCVQRREL

SEQ ID NO: 1912 - protein, 113 aa, Artificial Sequence
  Description of Artificial Sequence:  Synthetic peptide
QDYVNTEIRGFRWYMGEMERAKAESTLRGTPNGTFLVRYSTNRKQTAISLSYKNDVKHMIIEKNPDGKMYLDEDYVFNSTVELVQYYRDHNLIEIFQALDTCLKTPYSQCKVY

SEQ ID NO: 1913 - protein, 116 aa, Artificial Sequence
  Description of Artificial Sequence:  Synthetic peptide
KRTPFQNSCFGRWYWGAVTAAQAHAALQEASEGAFLVRDSSHPLYMLTLSVRTARGPTSIRIQYSSARFLLDSSSPARPSLSSFPNVPSLVQHYMGPKSKAEEGELAKEAPSKSSQ

SEQ ID NO: 1914 - protein, 114 aa, Artificial Sequence
  Description of Artificial Sequence:  Synthetic peptide
SVLEKLIKTCPVWLQLGLGRMEAARILQQEAAGTFLVCQDSSLKHLVLCVHFPSPNESSSKVLEYTVKEEKSILYLEGSVLVFEDIFRLIAFYCVSRDLLPFTLRLPQAILEAS

SEQ ID NO: 1915 - protein, 112 aa, Artificial Sequence
  Description of Artificial Sequence:  Synthetic peptide
SVLDRLVQTHAVWLQLGLSHQEAALILQNQPAGTFLVRKSSRMQRKVISVRMDHDAAPPVQDFPVRENRFTFSLEGSGLSFADLFRLVAFCCISRDVLPFTLKLPDAVACAR

SEQ ID NO: 1916 - protein, 123 aa, Artificial Sequence
  Description of Artificial Sequence:  Synthetic peptide
TDMGGRQDMDPAWYLGQITRGEAESCLRRVNRDGTFLVRDSSNRSSNQPYTLVVLYQDKVYNIQIRRNQDRFMLGTGMKASESFERVSDIVNQHKHTPLLLIDAKNRESGQQKQCALIYPAGY

SEQ ID NO: 1917 - protein, 110 aa, Artificial Sequence
  Description of Artificial Sequence:  Synthetic peptide
PHSQKQQLKQEIWFHGSVSRAEAESMLTRDGDFLVRESQGSPGQYVLTGMNNNTPKHLLLIDPEGVVRTKDRVFDSVSHLVNHHCDNVLPIISADSVLVLRYPIPRRTNN

SEQ ID NO: 1918 - protein, 111 aa, Artificial Sequence
  Description of Artificial Sequence:  Synthetic peptide
YLAPAESGQTQPWFFGTLNRLQAQSHLLAPENSEGAFLIRVSEKDNVGYVLSVRSGDQVKHYKVLQTDQNRFYVEPGRRFSSLAELVDYYQKTSLNNAGPLGNPCKRNTLS

SEQ ID NO: 1919 - protein, 108 aa, Artificial Sequence
  Description of Artificial Sequence:  Synthetic peptide
GVRSGGKLSLMPWFHGKITRDQAERLLYPPETGLFLVRESTNFPGDYTLCVSCEGKVEHYRIIYHNGKLTIDEEAFFENLMQLVEHYTKDADGLCTKLIKPKLEEGAV

SEQ ID NO: 1920 - protein, 117 aa, Artificial Sequence
  Description of Artificial Sequence:  Synthetic peptide
VADLTAEMSQFPWFHGTLTRSEAARMVLQSEAAGHGYFLVRQSETRRGEFVLTFNFQGRAKHLRLTISEKGQCRVQHLWFPSIQEMLEHFRHNPIPLESGGTSDVVLTDWVHNTSRL

SEQ ID NO: 1921 - protein, 110 aa, Artificial Sequence
  Description of Artificial Sequence:  Synthetic peptide
FDGPQCPLTAEVWFHAGISRPISERLLQQDGDFLVRESQGKRGQYVLTGLEGKTPKHLLLIDPEGVVRTKDRIFDSISHLINYHWAHALPIISEDSELVLRNPVRRPQQD

SEQ ID NO: 1922 - protein, 109 aa, Artificial Sequence
  Description of Artificial Sequence:  Synthetic peptide
FIAPYNSLDKYTWYHGKISRSDSEAILGSGITGSFLVRESETSIGQYTISVRHDGRVFHYRINVDNTEKMFITQEVKFRTLGELVHHHSVHADGLICLLMYPASKKDKG

SEQ ID NO: 1923 - protein, 110 aa, Artificial Sequence
  Description of Artificial Sequence:  Synthetic peptide
VHDHLKDLWNDGRIMGFVSRSQERRLLKKTMSGTFLLRFSESSEGGITCSWVEHQDDDKVLIYSVQPYTKEVLQSLPLTEIIRHYQLLTEENIPENPLRFLYPRIPRDEA

SEQ ID NO: 1924 - protein, 124 aa, Artificial Sequence
  Description of Artificial Sequence:  Synthetic peptide
YPLNSQDPTSERWYHGHLSGKEAEKLLLDKGKPGSFLVRESQSKPGDFVLSVLTSEEKLENGERKSRVTHVMIRFQPDGKYDVGGGERFDTLTDLLDHYKKNPMVEKSGAVVHLKQPFNATRIN

SEQ ID NO: 1925 - protein, 113 aa, Artificial Sequence
  Description of Artificial Sequence:  Synthetic peptide
YPLNCADPTNERWFHGHITGKEAEKSLVDKGKNGSYLVRESHSKPGDYVLSVRTEDKVTHVMIRCQDTKYDVGGGEQFETLTDLVDHYRKNPMVETTGYVVHLKVPFNATRIS

SEQ ID NO: 1926 - protein, 111 aa, Artificial Sequence
  Description of Artificial Sequence:  Synthetic peptide
DPLGTSLGWTGPWYYGNINRVKAEKLLLASQNKDGSFLVRISESHSDEYTISARSEGKVFHFRIQRSSIGAYFVSDRISFATLGELISYYQRNNRSLGVLLEEPCAQQRPL

SEQ ID NO: 1927 - protein, 107 aa, Artificial Sequence
  Description of Artificial Sequence:  Synthetic peptide
MNREENLCWFHGKISREDAEEILRREGSDGVFLVRESSSSEGDYVLSVLFKGEVVHYAIRRHGDDAFFSIHDHTPIHGLDSLIEHYQKDKGNLVTRLQVICRSDPPP

SEQ ID NO: 1928 - protein, 124 aa, Artificial Sequence
  Description of Artificial Sequence:  Synthetic peptide
EANNLAGRLYGSEYHGLMGHLEAEQLLANARDGSYFVRRSPQSDGYYTLSLRFNKRPKHYKLLYKPGVGHYLRGQDKRFDTVHDMVADGLINFHMQLHASPIIQQINQQTKNCYQQSPYMTLNG

SEQ ID NO: 1929 - protein, 107 aa, Artificial Sequence
  Description of Artificial Sequence:  Synthetic peptide
LDPAIDPNTVFPWFHPTCTKNEAVDMLVKAGPGSFLVRPSDNSPGDYSLFFHINNQIQRFRIEKKGVRYLMGGRTFECLDAVINRYRKEQIVEGHTLMHPVINGSQP

SEQ ID NO: 1930 - protein, 115 aa, Artificial Sequence
  Description of Artificial Sequence:  Synthetic peptide
VVEAEKGLERFDWFCKNTNRSQAEKLLRTENKDGGFLVRESSRAGKYTVSLLSKVGGETGGSCRHYNICTTSQGHFYLAEKHYFSTIPELINYHQHNAAGMVSRLKYIVSTRTRP

SEQ ID NO: 1931 - protein, 123 aa, Artificial Sequence
  Description of Artificial Sequence:  Synthetic peptide
PPVCDRLLSEFNWFVGTMNRDSATQRLENKKIGTYLLRVRPQGASHESETIYALSLKTDKKIIKHMKIYQKKEHQNVFYYLSTRRYFKTIIELVSFYERNDLGENFAGLNQLLQWPFKEEIVV

SEQ ID NO: 1932 - protein, 118 aa, Artificial Sequence
  Description of Artificial Sequence:  Synthetic peptide
VPQDGEDLAGQPWYHGLLSRQKAEALLQQDGDFLVRASGSRGGNPVISCCWRGSALHFEVFRVALRPRPGRPTALFQLEDEQFPSIPALVHSYMTGRRPLSQATGAVVSRPVTWQGPL

SEQ ID NO: 1933 - protein, 130 aa, Artificial Sequence
  Description of Artificial Sequence:  Synthetic peptide
ATAMRDLKNTAGWYWGSLTANEAKEILQDTSEGTFLVRDSSQRDYLFTISAMTSAGPTNLRIEYKDGKFKLDSVVLVKPKLKQFDSVVHLVEHYVQLSRTSCKGRTNQIAPSNGTVQLLLTTPVYTATPS

SEQ ID NO: 1934 - protein, 108 aa, Artificial Sequence
  Description of Artificial Sequence:  Synthetic peptide
KPSMDGKFGGKQWYYGKLTRHQAEMVLNQRGVDGDFLIRDSESMPNDFSISLKALYKNKHFKVLLNDGFFCIGQRKFSTMEDLVEHYKKAPIFTSEHGDKLYLIKPLT

SEQ ID NO: 1935 - protein, 116 aa, Artificial Sequence
  Description of Artificial Sequence:  Synthetic peptide
YVARVNTLETEEWFFKDITRKDAERQLLAPGNNPGAFLIRESETSKGSYSLSIRDYDPKTGDVIKHYKIRTLDNGGYYISPRITFTSICDMIQHYQKQADGLCRKLDKPCYSPKPQ

SEQ ID NO: 1936 - protein, 109 aa, Artificial Sequence
  Description of Artificial Sequence:  Synthetic peptide
VPRNYIVTTFPSWYKENTSRQSAQDELMCQPIGAFIIRGSQSSPGDFSISVRHENDVQHFKVMRDRQGRYYLWSEMFTSLNKLVDYYTHNSISKQSRVFLLTDQRSSSD

SEQ ID NO: 1937 - protein, 116 aa, Artificial Sequence
  Description of Artificial Sequence:  Synthetic peptide
YVARAQTLQVERWFFKDMNRRDTERLLLAPGNKPGSFLVRESETTKGAFSLSIRDSTPEQGDVVKHYKIRALDNGGYYISPSTSFSSLQELVKYYSRTADGLCQRLGNPCKSTAPQ

SEQ ID NO: 1938 - protein, 113 aa, Artificial Sequence
  Description of Artificial Sequence:  Synthetic peptide
LATMRVQLHGYTWFHGNLSGKEAEKLILERGKNGSFLVRESQSKPGDFVLSVRTDDKVTHVMIRWQDKKYDVGGGESFGTLSELIDHYKRNPMVETCGTVVHLRQPFNATRIT

SEQ ID NO: 1939 - protein, 123 aa, Artificial Sequence
  Description of Artificial Sequence:  Synthetic peptide
YPLNCADPTSERWFHGHLSGKEAEKLLTEKGKHGSFLVRESQSHPGDFVLSVRTGDDKAESNDGKSKVTHVMIRCQDLKYDVGGGEKFDSLTDLVEHYKKNPMVETLGTVLQLKQPLNTTRIN

SEQ ID NO: 1940 - protein, 107 aa, Artificial Sequence
  Description of Artificial Sequence:  Synthetic peptide
MYKTALHSPLLREGKESRHTQESISGGDGKTKGKATAARSEYSRGKELLGHNTKQHEDDVQHFKVMRDTKGNYFLWTEKFPSLNKLVDYYRTTSISKQKQVFLRDGT

SEQ ID NO: 1941 - protein, 109 aa, Artificial Sequence
  Description of Artificial Sequence:  Synthetic peptide
NYVKKMGLDSEEWFFPQLSRTRAENILKGEGREGGFVVRNSSRENMYTLSICHEGQVRHYHIKLDESNKYFISEKHRFPSIKELIEYHKLNGGGLVTRLRKPPVQLAPN

SEQ ID NO: 1942 - protein, 114 aa, Artificial Sequence
  Description of Artificial Sequence:  Synthetic peptide
MFDKDIHTEPWYHGLLPREDIKAMLRKTGDFLIRSTEPKQGEARQYVLSAMQNEELEDAGVKHYVMRVNANNQIFLETKGFETITSLVNYYMTTKDPIKKMTVLKTPIVKQDWE

SEQ ID NO: 1943 - protein, 116 aa, Artificial Sequence
  Description of Artificial Sequence:  Synthetic peptide
MVDKGLLHQGYYHGLLPRDDIKEMLHKPGEFLIRTSEPVKGQPRQFILSAVGNGQTGPNHFVIRESENHKVFVDQRGFDTIIELVNHYVATKEPLFAQNKSVKVVIKHAVERQKWE

SEQ ID NO: 1944 - protein, 118 aa, Artificial Sequence
  Description of Artificial Sequence:  Synthetic peptide
PSIQRGPIEKEVYYHGFLPREDVKTVLKSNGEFLIRISEPRKGEQRSFILSVMHNNPPSPDEETWIKHFVIKYGENKYFIEKNAFMSVQELVDHHLKTRDSVKDEVYLLKALPRQSWE

SEQ ID NO: 1945 - protein, 108 aa, Artificial Sequence
  Description of Artificial Sequence:  Synthetic peptide
SSPYVKKFWNLRYITGFIGKAECQNYLLTCPLGAFMFRFSDSQLGALSISCYTYCEKTKRKEVGHLEPDTIKRLQTRSIPDMVKDLDYLLYLGADIPKDRAFGPYYTP

SEQ ID NO: 1946 - protein, 111 aa, Artificial Sequence
  Description of Artificial Sequence:  Synthetic peptide
YPVNQPKTSITQWLHQNLDRNGALIILQNASMADGSFLIRSSIKCHGYYVLTLVYEKKTYHFQIKSRADRWFYIDDGPLFETLPHLVDHYMQYADGLPTLLQFPVPSAENR

SEQ ID NO: 1947 - protein, 130 aa, Artificial Sequence
  Description of Artificial Sequence:  Synthetic peptide
TLLEQIIRTHAVWYLPHMGRPEVLHLLRRMEPGNFIVRASTRENCMALSVRLAPGAHVEIDHYIIEKLVVPLKPTTSKEPAAPTTAKAVRLEGSPLTFRSLPLLIEHYCVNENYYNLFSLIISVSRKKKS

SEQ ID NO: 1948 - protein, 93 aa, Artificial Sequence
  Description of Artificial Sequence:  Synthetic peptide
MTLTDCSSSLLADDVLGAFLLCPHPKKPNRGSLIVRFSSGLVTYAIKNSKGKFRLEKCHTDFESLAALMEHYTEFGDELECSLSCARVNHCYD

SEQ ID NO: 1949 - protein, 107 aa, Artificial Sequence
  Description of Artificial Sequence:  Synthetic peptide
PVPQTNAHESKEWYHANLTRAQAEHMLMRVPRDGAFLVRKRSEPSSYAISFRAEGKIKHCRVQQEGQTVLLGNSEFESLVDLISYYEKHPLYRKMKLRYPINEETLE

SEQ ID NO: 1950 - protein, 96 aa, Artificial Sequence
  Description of Artificial Sequence:  Synthetic peptide
LKKHLKPHWNDGAILGFVNKQQAHDLLINKPDGTFLLRFSDSEIGGITIAWKFDSQERMFWNLMPFTTRDFSIRSLADRLGDLSYLIYVFPDRPKD

SEQ ID NO: 1951 - protein, 116 aa, Artificial Sequence
  Description of Artificial Sequence:  Synthetic peptide
YVAPSDSIQAEEWYFGKITRRESERLLLNAENPRGTFLVRESETTKGAYCLSVSDFDNAKGLNVKHYKIRKLDSGGFYITSRTQFNSLQQLVAYYSRTWNGTTRVAIKTLKPGTMS

SEQ ID NO: 1952 - protein, 100 aa, Artificial Sequence
  Description of Artificial Sequence:  Synthetic peptide
REVLKRPKYYGREFFGMISREETDQLLSGAEGSYLIRESQRQPGTYTLALRFGNQTRNFRLYSDGKHFVGEKRFESIHDLVTDGLITLYIETKAAEYIAK

SEQ ID NO: 1953 - protein, 117 aa, Artificial Sequence
  Description of Artificial Sequence:  Synthetic peptide
VADLTAEMSVFPWFHGTLTRSEAARMVLHSDAAGHGYFLVRQSETRRGEFVLTFNFQGRAKHLRLTISEKGQCRVQHLWFPSIQEMLEHFRHNPIPLESGGTSDVTLTEWVHSHSRL

SEQ ID NO: 1954 - protein, 132 aa, Artificial Sequence
  Description of Artificial Sequence:  Synthetic peptide
HRCLAALHVSQPWFHGGVSRKEAQRLIEKQGLVDGMFLIRESQQHAQCFVLSLCHKLKIKHYLVIPREGSPLLGVLTLLISPLQCEDGGRKYFTIDDGLTLFIDLLQLVEFHQINKGILPVCLKHPCVCVVL

SEQ ID NO: 1955 - protein, 110 aa, Artificial Sequence
  Description of Artificial Sequence:  Synthetic peptide
VHDHLKDLWKDGHIMGFVSRSEERRLLKKTISGTFLLRFSETLEGGITCSWVEHQDDDKVLIYSLQPFTKEVLQSLPLTKIISQYQLLTEENIPENPLRFLYPRIPRDEA

SEQ ID NO: 1956 - protein, 108 aa, Artificial Sequence
  Description of Artificial Sequence:  Synthetic peptide
PVPQPNKHETKEWYHQTTTREQSEIVLNQIPQDGAFLVRPSEKGTKAFVISFRAHGKFKHCRIRVEGRLYEMGGMEFESLVDLVNFYSKHPLYRKVTLTYPIPREMIR

SEQ ID NO: 1957 - protein, 115 aa, Artificial Sequence
  Description of Artificial Sequence:  Synthetic peptide
TENKITNLEIYEWYHRNITRNQAEHLLRQESKEGAFIVRDSRHLGSYTISVFMGARRSTEAAIKHYQIKKNDSGQWYVAERHAFQSIPELIWYHQHNAAGLMTRLRYPVGLMGSC

SEQ ID NO: 1958 - protein, 119 aa, Artificial Sequence
  Description of Artificial Sequence:  Synthetic peptide
FVAKKGSVEAEEWFMPMLSRKDSERLLLLEGNAQGVFLVRESETSQGSLTLSVRDEERGLSGIMNTVKHYRIKHPDYRYYYITTKCSFSSLQELIQFYSIDSHGLCCKLTRACLCPPPI

SEQ ID NO: 1959 - protein, 107 aa, Artificial Sequence
  Description of Artificial Sequence:  Synthetic peptide
AGYQKNSDTIAPWFHGILTLKKANELLSTGVPGSFLIRVSEKIKGYALSYLSEEGCKHFLIDASANSYSFLGVDQLQHATLADLVEYHKVNPIICLIHTRNYCPIDI

SEQ ID NO: 1960 - protein, 116 aa, Artificial Sequence
  Description of Artificial Sequence:  Synthetic peptide
LKLSSSDMRSHGWYHGHIPREASETLVLRSGDFLVRDSLSTVGDYVLTCRWQQEVIHCRISKVLVKSGQTKIQYMLENESFDSVPTLVRHHAGTGRAVCPRTGAQLLCPVNRTLPL

SEQ ID NO: 1961 - protein, 114 aa, Artificial Sequence
  Description of Artificial Sequence:  Synthetic peptide
SILEKLIKTCPVWLQLSLGQAEVARILHRVVAGMFLVRRDSSSKQLVLCVHFPSLNESSAEVLEYTIKEEKSILYLEGSALVFEDIFRLIAFYCVSRDLLPFTLRLPQAILEAS

SEQ ID NO: 1962 - protein, 110 aa, Artificial Sequence
  Description of Artificial Sequence:  Synthetic peptide
VGRVENNIDNLPFYHGFMGRTECESMLSNHGDFLIRMTEVGRRVAYVISVRWHYQNSHVLVKRTKTKKLYWTKKYAFKSICELIAYHKLNQIPFYDNMTLICGLARHEWQ

SEQ ID NO: 1963 - protein, 114 aa, Artificial Sequence
  Description of Artificial Sequence:  Synthetic peptide
SAVNMALHRSQPWFHHRISRDEAQQLITRQGPVDGVFLVRDSQSNPRTFVLSMSHGQKIKHFQIIPVEDDGEVFHTLDDGHTKFTDLIQLVEFYQLNKGVLPCKLKHYCARMAV

SEQ ID NO: 1964 - protein, 113 aa, Artificial Sequence
  Description of Artificial Sequence:  Synthetic peptide
DDEDLPHHDERSWKLGNINRIQAEALLRGKRDGTFLVRDSSKAGCYACSVVVDGEVKHCVINKTPTGYGFAEPYNLYNSLKELVLHYQHTSLVQHNDSLNVTLAYPVYGHQRR

SEQ ID NO: 1965 - protein, 116 aa, Artificial Sequence
  Description of Artificial Sequence:  Synthetic peptide
YVAPVDSIQAEEWYFGKIGRKDAERQLLCHGNCRGTFLIRESETTKGAYSLSIRDWDEAKGDHVKHYKIRKLDSGGYYITTRAQFDTIQQLVQHYIERAAGLCCRLAVPCPKGTPK

SEQ ID NO: 1966 - protein, 110 aa, Artificial Sequence
  Description of Artificial Sequence:  Synthetic peptide
YVAPSDSIQAEEWYFGKITRRESERLLLNAENPRGTFLVRESETTKGAYCLSVSDFDNAKGLNVKHYKIRKLDSGGFYITSRTQFNSLQQLVAYYSRTWNGTTRVAIKTL

SEQ ID NO: 1967 - protein, 119 aa, Artificial Sequence
  Description of Artificial Sequence:  Synthetic peptide
YVAPVDSIQAEEWYFGKLGRKDAERQLLSFGNPRGTFLIRESETTKGAYSLSIRDWDDMKGDHVKHYKIRKLDNGGYYITTRAQFETLQQLVQHYSGTWNGNTKVAIKTLKPGTMSPES

SEQ ID NO: 1968 - protein, 110 aa, Artificial Sequence; identical to SEQ ID NO: 1921
  Description of Artificial Sequence:  Synthetic peptide

SEQ ID NO: 1969 - protein, 117 aa, Artificial Sequence
  Description of Artificial Sequence:  Synthetic peptide
TGKKSNNLDQYEWYCRNTNRSKAEQLLRSEDKEGGFMVRDSSQPGMYTVSLYTKFGGEGSSGFRHYHIKETTTSPKKYYLAEKHAFGSIPEIIEYHKHNAAGLVTRLRYPVSTKEKN

SEQ ID NO: 1970 - protein, 114 aa, Artificial Sequence
  Description of Artificial Sequence:  Synthetic peptide
KLIATTAHEKMPWFHGKIDREDSELRLLNTSRVNGQISNQTKRKQWQKRVPNALCLLHNNQVMHYRIDKDRAGKLSIPDGKKFDTLWQLVEHYSYKPDGLLRVLTETCPRPSHH

SEQ ID NO: 1971 - protein, 117 aa, Artificial Sequence
  Description of Artificial Sequence:  Synthetic peptide
VPKNYIRLKPHPWYSGRISRQLAEEILMKRNHQGAFLIRESESSPGEFSVSVNYGDQVQHFKVLRDPSGKYYLWEEKFNSLNELVAFYRTTTIAKKRQVFLQDEEPLPKPPRACFAQ

SEQ ID NO: 1972 - protein, 110 aa, Artificial Sequence
  Description of Artificial Sequence:  Synthetic peptide
IHDHLKDLWKDGRIMGFVSRNQVRRLLKKTVSGTFLLRFSETLEGGITCSWVEHQDDDEVLINSVQPFTKEVLQSLPLTKIISQYQMLTEENIPENPLRFLYPRIPRDEA

SEQ ID NO: 1973 - protein, 110 aa, Artificial Sequence
  Description of Artificial Sequence:  Synthetic peptide
MAQDMPLGLHGKISRERAEALLKPWQDGFYLIRESTHYPGDFTLCVCISGRVEHYHIITTQNHNSSGRNSLTIDEEVFFLNLQELIQHYTEDADGLVCNLKKPVERKLDN

SEQ ID NO: 1974 - protein, 108 aa, Artificial Sequence
  Description of Artificial Sequence:  Synthetic peptide
MTGAPWYHRDISRVRAEELLAHAGIDGSFLVRDSESVPGAYALCLLFQRHVHTYRILPDADGLLAVQATQGVQVNCFRTLGDLVLGYQNPNKGLVAPLLYPVMRESEA

SEQ ID NO: 1975 - protein, 126 aa, Artificial Sequence
  Description of Artificial Sequence:  Synthetic peptide
LTEELKKLARQGWYWGPITRWEAEEKLANVLDGSFLVRDSSDDRYLLSLSFRSHSKTLHTRIEHSNGRFSFYEQPDVEGHTSIVELIEHSIRDSENGAFCYSRSRVPGSATYPVRLTNPVSRFMQV

SEQ ID NO: 1976 - protein, 128 aa, Artificial Sequence
  Description of Artificial Sequence:  Synthetic peptide
TKPDEKDVWQNEWYIGEYSRQAVEDVLMKENKDGTFLVRDCSTKSKAEPYVLVVFYGNKVYNVKIRFLESNQQFALGTGLRGNEMFDSVEDIIEHYTYFPILLIDGKDKAARRKQCYLTQPLPLARLL

SEQ ID NO: 1977 - protein, 119 aa, Artificial Sequence
  Description of Artificial Sequence:  Synthetic peptide
SDLYDCDWYWGDLDWKWAERLLLLCPVGYFLIRDSRSETHLFTVSYHAEDKVYHSRLSLEDSRQNLGSRRPYVSRDYRTLVKIIERSLKVDIFSFFQNSTPKKIDKSIFKFPEVFLAKL

SEQ ID NO: 1978 - protein, 114 aa, Artificial Sequence
  Description of Artificial Sequence:  Synthetic peptide
MKDSFISLQDAEWYWGDISREEVNDKLRDMPDGTFLVRDASTKMQGDYTLTLRKGGNNKLIKIYHRDGKYGFSEPLTFTSVVELINHYHHESLAQYNPKLDVKLTYPVSRFQQD

SEQ ID NO: 1979 - protein, 109 aa, Artificial Sequence
  Description of Artificial Sequence:  Synthetic peptide
YVTPFNSLEKHSWYHGPISRNAAEYLLSSGIDGSFLVRDSESSPGHRSISLRFDGRVYHYRISSGSDGKVFVTTESKFSTIAELVHHHCKQSDGLITTLRYPAAKMQKP

SEQ ID NO: 1980 - protein, 110 aa, Artificial Sequence
  Description of Artificial Sequence:  Synthetic peptide
KLIAITAHEQMPWYHGNIPRQEGERRLYCGAQPDGKFLVRERDEPGSFALSVMYGKTVYHYQILQAKSGKYSMPGGTNFDTIWQLVEYLKMKPDGLVTVLGEVCINGRAA

SEQ ID NO: 1981 - protein, 124 aa, Artificial Sequence
  Description of Artificial Sequence:  Synthetic peptide
LKLNSEDLRSHAWYHGRIPRQVSESLVKRDGDFLIRDSLSSPGNLVLTCQWKNLSQHFKINKVVIRLNEAYCRIQYQLEHESFDSIPALVRFYVGNRKAVSQQSGAIIFQPINRTVPLRCIEEK

SEQ ID NO: 1982 - protein, 108 aa, Artificial Sequence
  Description of Artificial Sequence:  Synthetic peptide
MGDGANNLPFFFGNITREEAEDYLVQGGMSDGLYLLRQSRNYLGGFALSVAHDRKAHHYTIERELNGTYAITGGRAHGSPAELCHYHTQELDGLVCLLKKPFNRPPGV

SEQ ID NO: 1983 - protein, 114 aa, Artificial Sequence
  Description of Artificial Sequence:  Synthetic peptide
DTIILLTLSSRWFHPNISGMEAEQLLLNNGFDGCFLCRPSKSNPGDFTLSVRRNGEVTHIKIQNTGDFFDLYGGEKFATLAELVQHYTEGRNQLKERNGQMIELKYPLNCADPT

SEQ ID NO: 1984 - protein, 116 aa, Artificial Sequence
  Description of Artificial Sequence:  Synthetic peptide
FVAKLNSMETEPWFYKNLSRNDAMRQLLAPGNTQGSFLIRESETQPGSFSISVRDLDPMQGDIIKHYRIRNMDAGGFYITNKISFNSLSELVKHYSREADGLCTRLVKPCQTRAPQ

SEQ ID NO: 1985 - protein, 113 aa, Artificial Sequence
  Description of Artificial Sequence:  Synthetic peptide
RVDPALPLEKQPWFHGPLNRADAESLLSLCKEGSYLVRLSETNPQDCSLSLRSSQGFLHLKFARTRENQVVLGQHSGPFPSVPELVLHYSSRPLPVQGAEHLALLYPVVTQTP

SEQ ID NO: 1986 - protein, 129 aa, Artificial Sequence
  Description of Artificial Sequence:  Synthetic peptide
PTMKFVMDTSKFWFRPHITRAEAEALVKDKEAGTFVVRDSTSYRGSFGLAMKVEPGSPEYFSFLTLTEPNSSELVRHFLIESSAKGVRVKGSSQEPYFGSLSALVYQHTISAYALPCKLVLHSKDASAA

SEQ ID NO: 1987 - protein, 107 aa, Artificial Sequence
  Description of Artificial Sequence:  Synthetic peptide
RGCQDAWCPGTPWDGEKARAAVGGRPAGSFLIVRDPGTSQPSLLCVSAGGKHEGVFDYHIKTTQTAFQLSESRLSFPNLAQLVLFYSLTRDVLPVRLTVPGWICSQT

SEQ ID NO: 1988 - protein, 112 aa, Artificial Sequence
  Description of Artificial Sequence:  Synthetic peptide
LDDSIDPNTVFSWFHPNVTKSEAVDMLVKAGPGSFLVRPSDNSPGDYSLFFHINNQIQRFRIEKKGVRYLMGGRTFECLDAVINRYRKEQIVEGHTLVQAMVTEPDGSVRVN

SEQ ID NO: 1989 - protein, 110 aa, Artificial Sequence
  Description of Artificial Sequence:  Synthetic peptide
FDMRKSQLLTESWYHGSISRAQSEHLLKNDGDFLVRESAGTQGQYVLTGMQNNSPKHLLLIDPEGIVRTKDRVFDSISHLINFHWTNSLPIISAESALLLRHPILRTTDL

SEQ ID NO: 1990 - protein, 111 aa, Artificial Sequence
  Description of Artificial Sequence:  Synthetic peptide
VALLQDEFAKHKWYYGNINRVKAEKLLLASQNKDGSFLVRISESHSDEYTISARSEGKVFHFRIQRSSIGAYFVSDRISFATLGELISYYQRNNRSLGVLLEEPCAQQREL

SEQ ID NO: 1991 - protein, 123 aa, Artificial Sequence
  Description of Artificial Sequence:  Synthetic peptide
PPVCDRQLSEFNWFAGNMDRETAAHRLENRRIGTYLLRVRPQGPSTAHETMYALSLKTDDNVIKHMKINQENSGDSMLYCLSSRRHFKTIVELVSYYERNDLGENFAGLNQSLQWPYKEVIAT

SEQ ID NO: 1992 - protein, 124 aa, Artificial Sequence
  Description of Artificial Sequence:  Synthetic peptide
VAPPSVLENIQSNCHGPIFMDFAINKLKKAGNQTGFYVLRCSPKDFKKYFLTFAIERENATDYKHCLITKNENGEYNLSGTKRSFGNLKDLLTCYQTETVRSDSIIFQFIKCCPPKPKDKSNLL

SEQ ID NO: 1993 - protein, 110 aa, Artificial Sequence
  Description of Artificial Sequence:  Synthetic peptide
VPKNYINVRPHTWFVGGISRQAAENRLRPLECGAFLIRESESTPGEFSVSVSYGDHVQHFKVLKDGLGQYFIWDEVFSSLNQLVDFYRINSIAKERTVFLRDPEGSLARP

SEQ ID NO: 1994 - protein, 130 aa, Artificial Sequence
  Description of Artificial Sequence:  Synthetic peptide
SIGVYGPPHYGDEFHGPVSREEADRLLTNGGDGSYLIRESLRARGSFTLGLRLLGATKHFRLYFDGQHYVADKRFDTVHDLVADGLITMYVETKAADYIGRIEFEEPIYDKYSKQATFMRPQESNSNGST

SEQ ID NO: 1995 - protein, 121 aa, Artificial Sequence
  Description of Artificial Sequence:  Synthetic peptide
AQFLMCGASKENAANALIHARYRIAQLDKAVGLKREPMDGIFLIRASASQSDKLVLSVLYGERVSHCLIEQNEEGWGFEHSNVYLTTIADFVRYYSHFSLETHADAIKTTLKMPAFDPVTK

SEQ ID NO: 1996 - protein, 127 aa, Artificial Sequence
  Description of Artificial Sequence:  Synthetic peptide
LTNEFKKLAQQGWYWGPLTRSEAEDKLNETPNGSFLVRDSSDERYLLSLSFRSFGRTLHTRIEHSSGNFSFYENNRMQSYDSVVDLIMDSVRDSQEAGIFCYSRTRDPLATTYPVRLIHPVSRLSQV

SEQ ID NO: 1997 - protein, 133 aa, Artificial Sequence
  Description of Artificial Sequence:  Synthetic peptide
VAPPLIVHNIQNGCHGPICTEYAINKLRQEGSEEGMYVLRWSCTDFDNILMTVTCFEKSEVSIFCPASPVKQFKNFQIEVQKGRYSLHGSDRSFPSLGDLMSHLKKQILRTDNISFVLKRCCQPKPREISNLL

SEQ ID NO: 1998 - protein, 113 aa, Artificial Sequence
  Description of Artificial Sequence:  Synthetic peptide
PVPQPNAHESREWYHSSLTRVQAEHMLMRVPRDGAFLVRKRSEHNSYAISFRAEGKIKHCRIQQEGRLFMLGSSAEFESLMDLVSYYEKHPLYRKMKCATPSTRTPWTRWAPR

SEQ ID NO: 1999 - protein, 113 aa, Artificial Sequence
  Description of Artificial Sequence:  Synthetic peptide
DPNTPQELRDAEWYWGKISRDVAKEKMMDAPDGSFLVRDAINDAGEFTLVLKKDGTDRPIKIYHKNGKYGFTQECTFESLVGMINEFRTTTLKEYNTILDISLLYPISRFEDE

SEQ ID NO: 2000 - protein, 110 aa, Artificial Sequence
  Description of Artificial Sequence:  Synthetic peptide
VPKNFIDIQFPEWFHEGLSRHQAENLLMGKEVGFFIIRASQSSPGDFSISVRHEDDVQHFKVMRDNKGNYFLWTEKFPSLNKLVDYYRTNSISRQKQIFLRDRTREDQGH

SEQ ID NO: 2001 - protein, 113 aa, Artificial Sequence
  Description of Artificial Sequence:  Synthetic peptide
VHGPPQDLSVHLWYAGPMERAGAEGILTNRSDGTYLVRQRVKDTAEFAISIKYNVEVKHIKIMTSEGLYRITEKKAFRGLPELVEFYQQNSLKDCFKSLDTTLQFPYKEPERR

SEQ ID NO: 2002 - protein, 114 aa, Artificial Sequence
  Description of Artificial Sequence:  Synthetic peptide
NYVAKDTLETEEWFFKGISRKDAERQLLAPGNILGSFMIRESETTKGSYSLSVRDSQAGDTVKHYKIRMLDNGGFYISPRITFSTLQELVSHYRQHSDGLCQTLSKACLNPKPE

SEQ ID NO: 2003 - protein, 98 aa, Artificial Sequence
  Description of Artificial Sequence:  Synthetic peptide
VPDVQKPLSQQNWYHGAIPRSEVQGLLVNRGDFLVRESQGKQEYVLSVLWDGQPRHFIIQNVDNLYRLEGEGFSTIPLLINHFVKTQQAVTKKSGVII

SEQ ID NO: 2004 - protein, 108 aa, Artificial Sequence
  Description of Artificial Sequence:  Synthetic peptide
PVPQPNKHEEKEWWHAECTRTLAEEMLKRIPTDGAFLVRPSEKENNSYAISFRAENKIKHCRIKLEGRLYTIGTVQFESLVELVNYYERHPLYKKIKLSHPVNEDVIR

SEQ ID NO: 2005 - protein, 111 aa, Artificial Sequence
  Description of Artificial Sequence:  Synthetic peptide
IPSNFIRMRECPWYLGKITRNDAEVLLKRKNVKDGNFLVRQCESSPGEFSVSVRFQDSIQHFKVLRDKGGKYYLWTEKHNSLNELVRYHRTASVSRTHTLLLSDMTIEVKF

SEQ ID NO: 2006 - protein, 115 aa, Artificial Sequence
  Description of Artificial Sequence:  Synthetic peptide
NYVTEAEDSIEMWYSKHMTRSQAEQLLKQEGKEGGFIVRDSSKAGKYTVSVFAKSTGDPQGVIRHYVVCSTPQSQYYLAEKHLFSTIPELINYHQHNSAGLISRLKYPVSQQNKN

SEQ ID NO: 2007 - protein, 107 aa, Artificial Sequence
  Description of Artificial Sequence:  Synthetic peptide
PVPQPKKHEDQEWFHPNTTKEQAEQGLYRLEIGSFLVRPSVQSINAFVISFTINRKIKHCRIMQEGRLYGIDTMNFESLVSLINYYTRNPLYRNVKLSHPVSQELLR

SEQ ID NO: 2008 - protein, 118 aa, Artificial Sequence
  Description of Artificial Sequence:  Synthetic peptide
TGLDPKTRAPAPWFHGIISRDQSEVLLTHKPTGSFLVRVSERIWGYTVSYASRDGSFKHFLVEKIKEGYQFLGTNQVVHDELFDLVAYHEMKNSNFEKSCHFVVKLQNINCLLNSERK

SEQ ID NO: 2009 - protein, 110 aa, Artificial Sequence
  Description of Artificial Sequence:  Synthetic peptide
CKPKVPRLQGKPWFHGSMDRKKALESIQKHGAKDGQFLLRSSANKPDTMVLSMAANGTVFNFEINTKMESFYIDDGPYFDTLEQLIDHYSRYDDGLPTMLLHPIPPPPGR

SEQ ID NO: 2010 - protein, 126 aa, Artificial Sequence
  Description of Artificial Sequence:  Synthetic peptide
LTEELKKLAKQGWYWGPITRWEAEEKLVNLPDGSFLVRDSSDDRYLLSLSFRSQGKTLHTRIEHSNGRFSFYEQPDVEGHTSIVDLIEHSIKDSETGAFCYSRSRLPGSATYPVRLTNPVSRFMQV

SEQ ID NO: 2011 - protein, 125 aa, Artificial Sequence
  Description of Artificial Sequence:  Synthetic peptide
FAASIEKVKDYGWYWGPISGEAAEKILSNEPDGSFIVRDSSDDHYIFSLSFRLNSCVRHVRIEHDQGNFSFGSCTKFKSHTIVDFIENAVEHSRSGRYLFFLHRRPVLGPMRVQLLHPVSRFKQV

SEQ ID NO: 2012 - protein, 121 aa, Artificial Sequence
  Description of Artificial Sequence:  Synthetic peptide
VAPPRLVEAITSHCHGPISLEFAINQLQKCGNKQGLFILQCSPKDFNKYFLTFPVEVYGTVEFKHCQITRSECGQFNLSGTKRNFSSLHELLSCYKNETVRSDSVVFQFSKCCPPKAKERS

SEQ ID NO: 2013 - protein, 107 aa, Artificial Sequence
  Description of Artificial Sequence:  Synthetic peptide
PVPQTNAHESKEWYHASLTRGQAEHMLMRVPRDGAFLVRKRSEQNSYAISFRAEGKIKHCRVIQEGQSVVLGSSEFDSLVDLISYYEKHPLYRKMKLRYPINEETLE

SEQ ID NO: 2014 - protein, 93 aa, Artificial Sequence
  Description of Artificial Sequence:  Synthetic peptide
MSLRPRFHGIISREQADELLGGVEGAYILRESQRQPGCYTLALRFGNQTLNYRLFYDGKHFVGEKRFESIHDLVTDGLITLYIETKASEYISK

SEQ ID NO: 2015 - protein, 114 aa, Artificial Sequence
  Description of Artificial Sequence:  Synthetic peptide
QREPSDLLQDAEWYWADISREEVNEILHGMPDGAFLVRDASCKVQGEYTLTVRNNGTNKLIRILHQEGKFGFSEPLTFSSVPELISFYRNRSLVHYNTSLDVTLAYPVTHCNTD

SEQ ID NO: 2016 - protein, 118 aa, Artificial Sequence
  Description of Artificial Sequence:  Synthetic peptide
IPKNYIRVKPHPWYSGRISRQLAEEILMKRNHLGAFLIRESESSPGEFSVSVNYGDQVQHFKVLREASGKYFLWEEKFNSLNELVDFYRTTTIAKKRQIFLRDEEPLLKSPGACFAQA

SEQ ID NO: 2017 - protein, 125 aa, Artificial Sequence
  Description of Artificial Sequence:  Synthetic peptide
YVARADTLDVEKWFFKDMSRKETERLLLAPGNKGGSFLVRESETTPGSFSLSIRDSVPEEGDVVKHYKIRCLDNGGYYISPFNTFPSLQELVKYYTGTADGLCQRLFAPCKPKAFQQPWAQDEWE

SEQ ID NO: 2018 - protein, 107 aa, Artificial Sequence
  Description of Artificial Sequence:  Synthetic peptide
PVPQPKKHESQDWFHPNTTKEQAEQGLLKLDIGSFLVRPSVQSVNAFVISFTINRKIKHCRIMQEGRLYAIDTMQFESLVSLIHYYMRNPLYRNVKLVHPVSQELLR

SEQ ID NO: 2019 - protein, 110 aa, Artificial Sequence
  Description of Artificial Sequence:  Synthetic peptide
QLVGGILHRKQLWFHGAISREESEQRMKAFGLRDGLFLVRERTEVNSFALCVAVKNDIYHYLLEMNTLGQLSIENGRKFENLLQVVDHYSRTPDGLLCTLVDVCAVTRFE

SEQ ID NO: 2020 - protein, 113 aa, Artificial Sequence
  Description of Artificial Sequence:  Synthetic peptide
SPGEEENSLNEEWYVSYITRPEAEAALRKINQDGTFLVRDSSKKTITNPYVLMVLYKDKVYNIQIRYQEESQVYLLGTGLRGKEDFLSVSDIIDYFRKMPLLLIDGKNRGSRY

SEQ ID NO: 2021 - protein, 113 aa, Artificial Sequence
  Description of Artificial Sequence:  Synthetic peptide
DEKNLPHQDETYWFVGEMSRTQAEEMLQGKDPGTFLIRESSKQGSYACSVVVNQEVKHCMIYRTPHGYGFAEPYDVHCSLKDLVLHYRLHSLAQHNDALDVRLSHPVHAKSPA

SEQ ID NO: 2022 - protein, 98 aa, Artificial Sequence
  Description of Artificial Sequence:  Synthetic peptide
TRKHLRGPWNDGSIMGFVSRSMAHDLLLSQQVGCFLLRFSDSEIGGITIAWLAEDANTERQVYNLQPFTADDFNIRSLADRIHDLSHLTHLYPDKPKD

SEQ ID NO: 2023 - protein, 112 aa, Artificial Sequence
  Description of Artificial Sequence:  Synthetic peptide
QQRRALHLHEMPWFFGKITREKAEELLTPREVGLFLVRESTNFPGDYTLCVVSPQNNKKVEHYRVISTSDNQVTVDEEAFFPTLIELIKHYEKDADGLCTMLKKPLKKKTEI

SEQ ID NO: 2024 - protein, 111 aa, Artificial Sequence
  Description of Artificial Sequence:  Synthetic peptide
IPSNYIRMTECNWYLGKITRNDAEVLLKKPTVRDGHFLVRQCESSPGEFSISVRFQDSVQHFKVLRDQNGKYYLWAVKFNSLNELVAYHRTASVSRTHTILLSDMNVETKF

SEQ ID NO: 2025 - protein, 115 aa, Artificial Sequence
  Description of Artificial Sequence:  Synthetic peptide
FVARVESLEMERWFFRSQGRKEAERQLLAPINKAGSFLIRESETNKGAFSLSVKDVTTQGELIKHYKIRCLDEGGYYISPRITFPSLQALVQHYSKKGDGLCQRLTLPCVRPAPQ

SEQ ID NO: 2026 - protein, 113 aa, Artificial Sequence
  Description of Artificial Sequence:  Synthetic peptide
QPHRPRTLQEAEWYWGDITRDEVNEKMIDSPDGTFLVRDASSKGGEYTLTLRKGGTNKLIKICQRNGKYGFSEPYNFHSVIELVDHYRNCSLAQYNSTLDIKLLYPVSRFQQD

SEQ ID NO: 2027 - protein, 118 aa, Artificial Sequence
  Description of Artificial Sequence:  Synthetic peptide
LVENEGSLTENIWAFAGLSRSCALSLLRRDVHGAFLLWPEPGTSDQWSLSVRTQCGVVPHQVFRNHLGRFCLEHLPAEFPSLEALVESHAGVERSLFCPLSMGRLNPTYEEQDCGTEG

SEQ ID NO: 2028 - protein, 119 aa, Artificial Sequence
  Description of Artificial Sequence:  Synthetic peptide
YPLNCSDPTTERWYHGHLSGPNAEKLLRERNEPGTFLVRESLSKPGDFVLSALTDDQTSSGRRVSHIKIMCNNDRYTVGGKDQFDNLTDLVEHFKRVGIEELSGTMVYLKQPYYSTRLN

SEQ ID NO: 2029 - protein, 120 aa, Artificial Sequence
  Description of Artificial Sequence:  Synthetic peptide
VPKNYIKVKPHPWYAGRISRHVAEELLLKRRYVGAFLIRESESAPGEFSISVNYGQHVQHFKVLRERNGKYFLWEEKFNSLNELVDFYRTTTIAKKQQIFLRDDEQSPEVKRPKFVQAQF

SEQ ID NO: 2030 - protein, 108 aa, Artificial Sequence
  Description of Artificial Sequence:  Synthetic peptide
IPTSEKPLGEQEWYHGAIPRTEAQELLKQQGDFLVRESHGKPGEYVLSVFSDGQRRHFIIQFADVKEAMQRIHDRGNIGKLILDVEKSPTPLGQIGILQDKIDHLERL

SEQ ID NO: 2031 - protein, 116 aa, Artificial Sequence
  Description of Artificial Sequence:  Synthetic peptide
YIEPADVLQAEDWFFEKMTRKEAEKQLQLAGNSRGTFLIRGSETSPGAYSLSVLDHDDARGFNVKHYRIRTLDNDGYYISTRITFHTLHDLVNHYTSQADGLVCRLLNPCPRQKPV

SEQ ID NO: 2032 - protein, 110 aa, Artificial Sequence
  Description of Artificial Sequence:  Synthetic peptide
VGRVENNIDNFPFYHGFMGRNECEAMLSNHGDFLIRMTEIGKRVAYVISIKWKYQNIHVLVKRTKTKKLYWTKKYAFKSICELIAYHKRNHKPIYEGMTLICGLARHGWQ

SEQ ID NO: 2033 - protein, 117 aa, Artificial Sequence
  Description of Artificial Sequence:  Synthetic peptide
MAGNFDSEDRASWYWGKLNRQEAVNLLQGQRHGVFLVRDSTTIPGDYVLSVSENSKVSHYIINSVSNNRQSGTGMIQSRFRIGDQEFDSLPSLLEFYKIHYLDTTTLIEPVSKSKQS

SEQ ID NO: 2034 - protein, 119 aa, Artificial Sequence
  Description of Artificial Sequence:  Synthetic peptide
YLAEKETVESEPWFFGCISRSEAMHRLQSEDYPKGTFLIRVSQKPGADYVLSVWDAEAVRHYRIWRNSAGRLHLNEVVSFSSLSELVNYHKTHNLSPGLQLSMACWKLKTEPLPHWDDW

SEQ ID NO: 2035 - protein, 115 aa, Artificial Sequence
  Description of Artificial Sequence:  Synthetic peptide
YNKTHHFLSSYSWFHGPISRVRAAYLVQHAGVSGHGNFLVRQSETRRGDYVLTFNYQGRAKHLRLSLTEWGQCRVQHLRFPSVMDMLSHFRNCPIPLECGAACDVMLANYVRVNP

SEQ ID NO: 2036 - protein, 123 aa, Artificial Sequence
  Description of Artificial Sequence:  Synthetic peptide
PPVCDRQLTEFNWFVGNMDRETAANRLENRRIGTYLLRVRPQGPSTAHETMYALSLKTDDHVIKHMKINQEIGTEGMLYCLSTRRHFKTIVELVSYYERNDLGENFAGLNTLLQWPYREVIAT

SEQ ID NO: 2037 - protein, 115 aa, Artificial Sequence
  Description of Artificial Sequence:  Synthetic peptide
PRTHEQTLANEPWYHGLLPREDMKVLLTQRGDFLVRFTDPKVGEPRKFVLSVYVGVADDIRHYVIREYENKFAVDAKWFATIPDLLNYHHRTKEPVAIGCQESVLIRPIGREPWE

SEQ ID NO: 2038 - protein, 115 aa, Artificial Sequence
  Description of Artificial Sequence:  Synthetic peptide
SETVEHPLSECQWFHGTLSRLKAAQLVLAGGMASHGVFLVRQSETRRGEYVLTFNFQGKAKHLRLSLNEDGQCRVQHLWFQSIFDMLEHFRVHPIPLESGGASDVTLISFVGATN

SEQ ID NO: 2039 - protein, 108 aa, Artificial Sequence
  Description of Artificial Sequence:  Synthetic peptide
DWTRTEDLSIEPWYQGEMSRKEAEQLLKKCGDFLVRKSTTNPGSYVLTGMQNGQAKHLLLVDPEGTVRTKDRVFDSISHLINHHLENNLPIVSSGSKLCLQQPAERKH

SEQ ID NO: 2040 - protein, 113 aa, Artificial Sequence
  Description of Artificial Sequence:  Synthetic peptide
PVPQQNSHLGKAWFHENLSRSEAEEMLKKVRMDGAFLIRPSEQNTKAGQKNYAISFRAEGKVKHCRIEVDESGQYCIGSAIFDSLTELVQYYEANPLYRRMRLKYAINEDLLK

SEQ ID NO: 2041 - protein, 119 aa, Artificial Sequence
  Description of Artificial Sequence:  Synthetic peptide
FVKPLDSVEAEPWYFENVKTRVEAKRCLLRPENKEGDFLVWKCDENNHYYLSVKNGPHARHYRIKQGENDQQFFLVHHTTFQSLRKLIEFYSKHEGGLCAKLHEACVKLDQPVPQTLSF

SEQ ID NO: 2042 - protein, 125 aa, Artificial Sequence
  Description of Artificial Sequence:  Synthetic peptide
VRTDIKLHLAQDWFHGNLGAGCGGWHIAERLLTEYRTRMGAPDGSFLVRESGTFVGVYILSWCNEKVRHCHIHWWQDASVPSFFLTDNRVFDSLYDIIIHYREMTLRYNRFEMRLTEAVPQSNTH

SEQ ID NO: 2043 - protein, 108 aa, Artificial Sequence
  Description of Artificial Sequence:  Synthetic peptide
DDDEEPELLACAWYQPRISAKAAQEHLQESTPGSFLLRRSTPRHFELCLRLERKVKTYPVQSTRTQMYRLKGAKKQFSTLKALITHHSVMAEQLPLTLDMPRERHVVK

SEQ ID NO: 2044 - protein, 128 aa, Artificial Sequence
  Description of Artificial Sequence:  Synthetic peptide
VTAKFVQDTSKFWYKPDISRDQAISVLKDKEPGCFIIRDSHSFRGAYGLAMKVATPPPSVLQQSKKADLSNELVRHFLIECTQKGVRLKGCPNEPYFGSLTALVCQHSITPLALPCKLILPDRGKQPT

SEQ ID NO: 2045 - protein, 108 aa, Artificial Sequence
  Description of Artificial Sequence:  Synthetic peptide
QKREGVKRNIMPWFHGKISREKAEELLQPCSDGLFLVRESTNFPGDYTLCVGWMGHVEHYHVLYRNNKLTIDEERYFENLTKLVEHYEEDSDGLCTRLQVALAKKGEL

SEQ ID NO: 2046 - protein, 111 aa, Artificial Sequence
  Description of Artificial Sequence:  Synthetic peptide
YVAEDRSLQAEPWFFGAIKRTDAEKQLLYSENQTGAFLIRESESQKGDFALSVLDEGVVKHYRIRRLDEGGFFLTRRRTFSTLNEFVSHYTKTSDGLCVKLGKPCLKIQVP

SEQ ID NO: 2047 - protein, 108 aa, Artificial Sequence
  Description of Artificial Sequence:  Synthetic peptide
IAPTEEQLRQEPWYHGRMSRRAAEKLLRADGDFLVRDSVTNPGQYVLTGMHAGQPKHLLLVDPEGVVRTKDVLFESISHLIDYHLKNGLPIVAAESELHLRGVVSREP

SEQ ID NO: 2048 - protein, 124 aa, Artificial Sequence
  Description of Artificial Sequence:  Synthetic peptide
LKMDCEELRSHAWYHGAIPRQVAENLVQRDGDFLIRDSLSSPGSYVLTSQWRNTAQHFKINKKVVALNEAYTRVEFRLEREGFDSVPALIRFYVGNRKPVSQVVGAIIFQPINRAVPLRCLEER

SEQ ID NO: 2049 - protein, 108 aa, Artificial Sequence
  Description of Artificial Sequence:  Synthetic peptide
KDYSSTVTAMPACFYAVSRKEAIEMLENNPLCGNLILRPGSDSKNYAITVRQMLDAPCIKHYRVTSRERSYIIELERQVTVRSLQDVISYFVIQTHGNLKPFIMQTCN

SEQ ID NO: 2050 - protein, 113 aa, Artificial Sequence
  Description of Artificial Sequence:  Synthetic peptide
FDPYVCVLPDMPMCFHKVSRVEAEILLERNPNDGNLLLRPAQDLSLSSFSLTTRQEVNGKSIFKHYRVFRRPEGGFVINLDSPINCATLHDVVNSMVEKTGGVLVPFHMEKHY

SEQ ID NO: 2051 - protein, 110 aa, Artificial Sequence
  Description of Artificial Sequence:  Synthetic peptide
IKKHLLCLWNDGCIMGFISKDKERALLKDQRPGTFLLRFSESSKEGAITFTWVEGSQNEPQFHSVEPYTKKELSAVTFPDIIRNYKVMAAENIPENPLRFLYPDIPKDNA

SEQ ID NO: 2052 - protein, 109 aa, Artificial Sequence
  Description of Artificial Sequence:  Synthetic peptide
SPSGSGRFAGKEWYYGKVTRHQAEVALNQRGVEGDFLIRDSESSPHDFSISLKAQSKNKHFKVQLKESLYCIGQRKFHSMEELVEHYKKAPIFTSEQGDKLYLVKALAA

SEQ ID NO: 2053 - protein, 89 aa, Artificial Sequence
  Description of Artificial Sequence:  Synthetic peptide
AGYERNGKAIAPWFHGIISREDSETLLMNAAVGSFLVRVSERIWGYTLSYRTASGFKHFLIDASGDYYSFLGVDQNRHATLADLIDFHK

SEQ ID NO: 2054 - protein, 114 aa, Artificial Sequence
  Description of Artificial Sequence:  Synthetic peptide
TRTHEQVLAKEPWYHGLLPREDMKQLLTQRGDFLVRFTDPKVGEPRKFVLSVYVGVIEDIRHYVIREHNNKFAVDKKWFSSIADLLNYYHRSKEPVAGGPETVIIRPIGREPWE

SEQ ID NO: 2055 - protein, 113 aa, Artificial Sequence
  Description of Artificial Sequence:  Synthetic peptide
SDGTRKKHQDMDWYHGLLPRADINTLLENDGDFLVRTSHIVGQDSAKTVLSVKWKGKCHHWQLQEKEDGSIVIEERKFESVLDMVTTLRMKRLPVSANCPALLLNPINKQDWE

SEQ ID NO: 2056 - protein, 119 aa, Artificial Sequence
  Description of Artificial Sequence:  Synthetic peptide
VAPPRLLEEVAEQCHGPITLDFAINKLKTGGSLPGSYVLRRSPQDFDSFLLTVCVQTPLGPDYKGCLIRCDPTGTFSLAGLGRPHSSLRELLTACWDGGLHMDGAALNLTFCCTPRPKE

SEQ ID NO: 2057 - protein, 112 aa, Artificial Sequence
  Description of Artificial Sequence:  Synthetic peptide
TGLDPKTRAPAPWFHGVISRDQSEILLANKPVGSFLVRVSERIWGYTVSYASRDGTFKHFLVEKIPEGYQFLGTNQVVHDELFDLVAYHETAPITAKGAEILKWAVGQVTRP

SEQ ID NO: 2058 - protein, 150 aa, Artificial Sequence
  Description of Artificial Sequence:  Synthetic peptide
MIDNYLLRYQFFHGFVLQELQLILLKTNGDFLLRLSHQPEKNAKKPTTPDKSATDPIPLTRVILVLSVNITQKTGTTRSFYGDLEDVKKENMDMHLFIEETAGKWTSFYIERRFKFPTIDELINYYKVNPICYHNTRVFLKRPIVLQDWE

SEQ ID NO: 2059 - protein, 110 aa, Artificial Sequence
  Description of Artificial Sequence:  Synthetic peptide
VKTHLEDLWRNGHIMGFVSKGKEKLLLKKKQSGTFLLRFSESVIGGITFSWVETSPSGEPDVKSVQPFTQVYLKQIPFVEILRSFQILEAGNVPVNPLIYLYPNTPKDEA

SEQ ID NO: 2060 - protein, 105 aa, Artificial Sequence [sequence omitted]

SEQ ID NO: 2061 - protein, 107 aa, Artificial Sequence
  Description of Artificial Sequence:  Synthetic peptide
SPGEEETPLDEEWYVSYITRPEAEAALRKINQDGTFLVRDSSKKTANNPYVLMVLYKDKVYNIQIRYQEESQVYLLGTGLRGKEVRTLVFTLCPDPILYSNYAVESH

SEQ ID NO: 2062 - protein, 118 aa, Artificial Sequence
  Description of Artificial Sequence:  Synthetic peptide
LVESEGSLTENIWAFAGISRPCALALLRRDVLGAFLLWPELGASGQWCLSVRTQCGVVPHQVFRNHLGRYCLEHLPAEFPSLEALVENHAVTERSLFCPLDMGRLNPTYEEQDCGPPG

SEQ ID NO: 2063 - protein, 137 aa, Artificial Sequence
  Description of Artificial Sequence:  Synthetic peptide
VMKLTREHLKNPWVDGYILGFVRKRQAEEMLANCASGTFLMRFSDSELGGVTIAWVGDQTEVFMLQPFTSKDFAIRSLADRVFDLQHLLYLYPDISKDQAFSKYYTPFTENQSTSTNGYVKPFLVTHVPGWGGPGVG

SEQ ID NO: 2064 - protein, 94 aa, Artificial Sequence
  Description of Artificial Sequence:  Synthetic peptide
TRDYLRTLWCDHLIMGFIQKKQAEEMLSKCPAGTFLLRFSDSELGGITIAWVGEGNEVFSLQPFTSRDLMLRSLADRVLDLTQLQFLYPNIAKD

SEQ ID NO: 2065 - protein, 112 aa, Artificial Sequence
  Description of Artificial Sequence:  Synthetic peptide
TVSNQPHSNEALWLLKDAKRRNAEEMLKGAPSGTFLIRARDAGHYALSIACKNIVQHCLIYETSTGFGFAAPYNIYATLKSLVEHYANNSLEEHNDTLTTTLRWPVLYWKNN

SEQ ID NO: 2066 - protein, 115 aa, Artificial Sequence
  Description of Artificial Sequence:  Synthetic peptide
DKAPFDDSNKHLWHFGGITRSETDNLLIQKRPGTFLVRDSRTCPGDSVLCVSENSKVSHYIITRKADQFVIGDQIFSTLPDILNFYRGHYLDTTVLVEPCPKNRMVQPPPQLPVS

SEQ ID NO: 2067 - protein, 118 aa, Artificial Sequence
  Description of Artificial Sequence:  Synthetic peptide
ALVLGYNIALPINNAIGMAGFETSEMLHKPGDFLVRTSEPIKGQPRQFILSAIGSGQSSLNHFVIRESENKKVFVDQRGFSTIIELVNHYVSQKDPIFTKDQKVKVVLKNAVERQKWE

SEQ ID NO: 2068 - protein, 115 aa, Artificial Sequence
  Description of Artificial Sequence:  Synthetic peptide
ITKTSSMLDTCGFYWGPMDVNVAHDKLKSEPVGTFLIRDSRQKNCFFAISVKTARETVSIRIKFYAGKFSLDGSKESFSCLFQLVEHYMISPKKMLVSPLRKVRLRPLQELCRKS

SEQ ID NO: 2069 - protein, 109 aa, Artificial Sequence
  Description of Artificial Sequence:  Synthetic peptide
VGREEDPHEGKIWFHGKISKQEAYNLLMTVGQVCSFLVRPSDNTPGDYSLYFRTNENIQRFKICPTPNNQFMMGGRYYNSIGDIIDHYRKEQIVEGYYLKEPVPMQDQE

SEQ ID NO: 2070 - protein, 103 aa, Artificial Sequence
  Description of Artificial Sequence:  Synthetic peptide
ILDKIRQLMECAWFHGDISTSESENRLRQKPEGTFLVRFSTSEYGAYTISKVSKNGGISHQRIHRPQGKFQVNNSKYLSVKELITGEAQALGINTPCLGSRFL

SEQ ID NO: 2071 - protein, 119 aa, Artificial Sequence
  Description of Artificial Sequence:  Synthetic peptide
IFNELVELTSASWYAFDITREIATSWLDKRQNGCFLVRLSSKTVEHPFVISYILKNEIKHNRVTRITTKNVSNRYSTKNIINGTEIVAKTITEIINKCIDAGMFSTICPHEKIQADTYS

SEQ ID NO: 2072 - protein, 136 aa, Artificial Sequence
  Description of Artificial Sequence:  Synthetic peptide
MAGNFDSEERSSWYWGRLSRQEAVALLQGQRHGVFLVRDSSTSPGDYVLSVSENSRVSHYIINSSGPRPPVPPSPAQPPPGEGRTGREAPGGGVSPSRLRIGDQEFDSLPALLEFYKIHYLDTTTLIEPVSRSRQG

SEQ ID NO: 2073 - protein, 121 aa, Artificial Sequence
  Description of Artificial Sequence:  Synthetic peptide
TEKLSNNIEKFEWYNKDINRTEAEDLLMQENKDGGFMVRNSKHAGVYTVSIFTRVSGSNGEKCPQVKHYQIKVQSEGEKVLYYLAEKYLFPTIPELIRYHQHNPAGLITRLRHCVSRNVPN

SEQ ID NO: 2074 - protein, 117 aa, Artificial Sequence
  Description of Artificial Sequence:  Synthetic peptide
SEVSNATIDKELYYHGLLPSEDVRQLLSNNGDFLLRSSEPEPGSPRTHILSVMFNNRLDDINSIKHFVVNFVDGKYFINDKMSFPSIQKMLGTYQRNNTEIKEGCMLVNPIRRQFWE

SEQ ID NO: 2075 - protein, 105 aa, Artificial Sequence
  Description of Artificial Sequence:  Synthetic peptide
ATAMRDLKNTAGWYWGSLTANEAKEILQDTSEGTFLVRDSSQRDYLFTISAMTSAGPTNLRIEYKDGKFKLDSVVLVKPKLKQFDSVVHLVEHYVQLSRTSCKGR

SEQ ID NO: 2076 - protein, 115 aa, Artificial Sequence
  Description of Artificial Sequence:  Synthetic peptide
ITRASSLLDACGFYWGPLTVSAAHEKLKSEPEGTFLIRDSTQKNCFFAISVKTATGPTSIRINFQTGRFSLDGSKETFDCLFKLLEHYLSSPRKVLVTPLRKVRVQPLQELCRKS

SEQ ID NO: 2077 - protein, 120 aa, Artificial Sequence
  Description of Artificial Sequence:  Synthetic peptide
MEELRRAGWYWGNMSVAEAKERLQDAPEGTFLVRDSSHSEYLLTISVKTSAGPTNLRIEYQDGKFRLDSITCVRSRLKQFNSVVHLIEYYVLMCKDRTETPSNGTVHLYLNKPLYTSAPS

SEQ ID NO: 2078 - protein, 108 aa, Artificial Sequence
  Description of Artificial Sequence:  Synthetic peptide
MENLSVYHGPIGKEEGERRLGQDGRDGCYLVRNSDSVPGVYCLCVLCQGYVYTYRLYKDHGGSWAAETTPGVQKRSFRHIRNLIAAFQKPGQGIAMPLLYPVTAQRRA

SEQ ID NO: 2079 - protein, 128 aa, Artificial Sequence
  Description of Artificial Sequence:  Synthetic peptide
FTASLRELERCGWYWGPMNWEDAEMKLRGKPDGSFLVRDSSDPRYILSLSFRSQGVTHHTRMEHYRGTFSLWCHPKFEDRCHSVVEFIERAIMHSKNGKFLYFLRSRVPGLPPTPVQLLYPVSRFSNV

SEQ ID NO: 2080 - protein, 116 aa, Artificial Sequence
  Description of Artificial Sequence:  Synthetic peptide
FVARANSLEAEEWFFKSISRKDAERQLLGPGNTLGSFMIRDSETTKGCYSLSVRDGDSLQGGSVKHYRIRTLDSGGFYISSRSSFDTLQELVKHYKGQSDGLCRRLTYPCSVPRPQ

SEQ ID NO: 2081 - protein, 116 aa, Artificial Sequence
  Description of Artificial Sequence:  Synthetic peptide
ILALTGQKKPPRWFHPNISGVEAEQLLMSSGQHGSFLARPSKSCPGGFTLSVRRHNEVTHIKIQNTGDYYDLYGGEKFATLAELVQHYTGQHGGLLRERGGAPVELRHPLGCQDPT

SEQ ID NO: 2082 - protein, 115 aa, Artificial Sequence
  Description of Artificial Sequence:  Synthetic peptide
CQKTDHFLSCYPWFHGPISRVRAAQLVQLQGPDAHGVFLVRQSESRRGEYVLTFNLQGRAKHLRLVLTERGQCRVQHLHFPSVVDMLRHFQRSPIPLECGAACDVRLSGYVVVVS

SEQ ID NO: 2083 - protein, 104 aa, Artificial Sequence
  Description of Artificial Sequence:  Synthetic peptide
RWFHRDITGLQAEDILKSRGIHGSFLARPSKKNAGDFALSVRVGDAVTHIRIQNTGDYYDLYGGDKFATLTELVDYYTADNGILQDKDGTMIELRYPLNCSDPT

SEQ ID NO: 2084 - protein, 108 aa, Artificial Sequence
  Description of Artificial Sequence:  Synthetic peptide
MLSHGWFHRDLSGLDAETLLKGRGVHGSFLARPSRKNQGDFSLSVRVGDQVTHIRIQNSGDFYDLYGGEKFATLTELVEYYTQQQGVLQDRDGTIIHLKYPLNCSDPT

SEQ ID NO: 2085 - protein, 107 aa, Artificial Sequence
  Description of Artificial Sequence:  Synthetic peptide
YGKEYHGTMDHKECEQMLKDKPDGSYLVRRSPGADNYYTLSLRFGQATKHFKIFYCPEKGHYLRENFKKFETVEEMVADGLVDFYMRLHAAPILKEMMSQTKKCYEQ

SEQ ID NO: 2086 - protein, 117 aa, Artificial Sequence
  Description of Artificial Sequence:  Synthetic peptide
CAEEQRRTQLYRWWHGNLPASSANKLLQTEKNGTYLLRASQHIPGALVISAKTEGQVVHLTIYQDPSTGRFNIDGDRTKFQSAWLLIDSYSKNPIVEKGEASRVLYLEEPLFNTFIE

SEQ ID NO: 2087 - protein, 123 aa, Artificial Sequence
  Description of Artificial Sequence:  Synthetic peptide
EEKTFKWLMNQKFYHGYLPREDLPYVLKKKGDFIFRVTERTVGKEQKKDIVLSIAWPTESVAMIDTKDIKNYLIERSANSVWLDLKISFHSIDALYNHYRKNELVHPNLRIKLGRPICLFFWE

SEQ ID NO: 2088 - protein, 123 aa, Artificial Sequence
  Description of Artificial Sequence:  Synthetic peptide
STSRFDSADRSAWYFGPVLRPEAQNRLQGQKHGMFLVRDSSTCPGDYVLSVSENSKVSHYIITSLPNKRFKIGDREFEHLPALLEFYKYHYLDTTTLIEPAPRYRSSTCAGTLSCPVQPIGAE

SEQ ID NO: 2089 - protein, 108 aa, Artificial Sequence
  Description of Artificial Sequence:  Synthetic peptide
DAKMLEELQAETWYQGEMSRKEAEGLLEKDGDFLVRKSTTNPGSFVLTGMHNGQAKHLLLVDPEGTIRTKDRVFDSISHLINHHLESSLPIVSAGSELCLQQPVERKQ

SEQ ID NO: 2090 - protein, 125 aa, Artificial Sequence
  Description of Artificial Sequence:  Synthetic peptide
YVAKVNTLETEEWFFKDITRKDAERQLLAPGNSAGAFLIRESETLKGSFSLSVRDYDPMHGDVIKHYKIRSLDNGGYYISPRITFPCISDMIKHYQKQSDGLCRRLEKACISPKLQKPWDKDAWE

SEQ ID NO: 2091 - protein, 108 aa, Artificial Sequence
  Description of Artificial Sequence:  Synthetic peptide
MADNVSALPFFYGNITREEAEDYLQLAGMADGLYLLRQSRNNLGGFALSVSSSGRSYHYSIERQANETYAIPGGKSHQDPVDVIDYHSQVMDGLVTLLKKPCNRPKNV

SEQ ID NO: 2092 - protein, 128 aa, Artificial Sequence; identical to SEQ ID NO: 2044
  Description of Artificial Sequence:  Synthetic peptide

SEQ ID NO: 2093 - protein, 113 aa, Artificial Sequence
  Description of Artificial Sequence:  Synthetic peptide
DDEDLPHHDERTWNVGNINRSQAENLLRGKRDGTFLVRESSKQGCYACSVVVDGEVKHCVINKTPTGYGFAEPYNLYNSLKELVLHYQHTSLVQHNDSLNVTLAYPVYAQQRR

SEQ ID NO: 2094 - protein, 108 aa, Artificial Sequence
  Description of Artificial Sequence:  Synthetic peptide
VPDVQKPLSQQNWYHGAIPRSEVQGLLVNRGDFLVRESQGKQEYVLSVLWDGQPRHFIIQNVDNLYRLEGEGFSTIPLLINHFVKTQQAVTKKSGVIINKAIVKDKWV

SEQ ID NO: 2095 - protein, 107 aa, Artificial Sequence
  Description of Artificial Sequence:  Synthetic peptide
WLVKMPTKHPRPHSKLGGGAVHLGSNPNAGPGEERIRARDNNGSYALCLLHEGKVLHYRIDKDKTGKLSIPEGKKFDTLWQLVEHYSYKADGLLRVLTVPCQKIGTQ

SEQ ID NO: 2096 - protein, 109 aa, Artificial Sequence
  Description of Artificial Sequence:  Synthetic peptide
LPQIKQQLRNEDCYHGKLNRKAAESLLVNDGDFLVRESTTSPGQYVLSGLQGGQAKHPLLVDPEGKVRTKDRIFDSVGHLIQYHMENNLPIISSGSEIGARPGGQATPS

SEQ ID NO: 2097 - protein, 104 aa, Artificial Sequence
  Description of Artificial Sequence:  Synthetic peptide
PVPNPNPHESKPWYYDSLSRGEAEDMLMRIPRDGAFLIRKREGSDSYAITFRARGKVKHCRINRDGRHFVLGTSAYFESLVELVSYYEKHSLYRKMRLRYPVTP

SEQ ID NO: 2098 - protein, 113 aa, Artificial Sequence
  Description of Artificial Sequence:  Synthetic peptide
YPLNCADPTTERWFHGHLSAKEAERLMLERGKNGSFLVRESQSKPGDFVLSVRTDDRVTHVIIRSQDNKYDVGGGDKFDSLSDLIEHYKRNPMVETSGSVVHLRQPFNATRIN

SEQ ID NO: 2099 - protein, 112 aa, Artificial Sequence
  Description of Artificial Sequence:  Synthetic peptide
WRSRGEVGGEGSWYHGSVSRQQAEAQLQRCREASFLVRDSESGTSKYSIALKTSQSCVHIIVAQTKGVKGLGFTLDQSSCVFPSIPELVHHYCTHRLPFTGAEHMTLQHPVH

SEQ ID NO: 2100 - protein, 109 aa, Artificial Sequence
  Description of Artificial Sequence:  Synthetic peptide
QRVSARVLLLLQWYHGKLDRTIAEERLRQAGKPGSYLIRESDRRPGSFVLSFLSKTNVNHFRIIAMCGDYYIGGRRFASLSDLIGYYSHVSCLLKGEKLLFPVAPPEPV

SEQ ID NO: 2101 - protein, 140 aa, Artificial Sequence
  Description of Artificial Sequence:  Synthetic peptide
SGGRVMRVIKHPLFRPFNSTQAEEFLGSQSRGDVVIRPSSKGPDHLAVTWKVADGIFQHIDVLELDKENEFSVGRTLKVGGRYTYSDLDDLIFNHVKAMAKKVDEMMLHEKYQEGSKDATYSWLNTYTKANPRRSAYAFC

SEQ ID NO: 2102 - protein, 122 aa, Artificial Sequence
  Description of Artificial Sequence:  Synthetic peptide
YVAPVDSIQAEEWYFGKIGRKDAERQLLSPGNPRGAFLIRESETTKGAYSLSIRDWDQTRGDHVKHYKIRKLDTGGYYITTRAQFHSVQELVQHYMEVNDGLCHLLSVACTTMKPQTMGLAK

SEQ ID NO: 2103 - protein, 111 aa, Artificial Sequence
  Description of Artificial Sequence:  Synthetic peptide
YVAEYKSLDAEEWFFGQVKRVDAEKQLMMPFNNLGSFLIRDSDTTPGDFSLSVRDIDRVRHYRIKKLENGTYFVTRRLTFQSIQELVAYYTQQADGLCVNLKGPCMVMEKP

SEQ ID NO: 2104 - protein, 108 aa, Artificial Sequence
  Description of Artificial Sequence:  Synthetic peptide
RSRCEVKLNAMPWFHGSITRDEAEHLLQPREDGLFLVRESTNFPGDYTLCVCFQSKVEHYRVKYLENKLTIDDEEYFENLGQLVAHYEADADGLCTQLIKCLPKLGKQ

SEQ ID NO: 2105 - protein, 105 aa, Artificial Sequence
  Description of Artificial Sequence:  Synthetic peptide
AFRAQEELEGQEWYHGIMSRREAEKLLRDDGDFLVRKSTTNPGSYVLTGLHNGLAKHLLLVDPEGTVRTKDHVFDSILHLIGHHRDNNLPILSAGSELFLLQPVG

SEQ ID NO: 2106 - protein, 113 aa, Artificial Sequence
  Description of Artificial Sequence:  Synthetic peptide
SDEEDLELKDACWYQAGISRDIAVEVLQSKSPGAFLVRKSSSKPGCYALTLRVPSPPGPKIANYIILRSPRGYKIKGFRKEFSSLKALITHHSVMPELLPVPLAMPRPTNMSS

SEQ ID NO: 2107 - protein, 110 aa, Artificial Sequence
  Description of Artificial Sequence:  Synthetic peptide
KLIATTAHEKMPWFHGKISRVESEQIVMIGSKTNGKFLIRDRNDNGSYALCLLHEGKVLHYRIDKDKTGKLSIPDGKKFDTLWQLVEHYSYKPDGLLRVLTVPCQKIGGQ

SEQ ID NO: 2108 - protein, 108 aa, Artificial Sequence
  Description of Artificial Sequence:  Synthetic peptide
PVPNPNPHESKPWYYDSLSRGEAEDMLMRIPRDGAFLIRKREGTNSYAITFRARGKVKHCRINRDGRHFVLGTSAYFESLVELVSYYEKHALYRKMRLRYPVTPELLE

SEQ ID NO: 2109 - protein, 77 aa, Artificial Sequence
  Description of Artificial Sequence:  Synthetic peptide
MDLPYYHGRLTKQDCETLLLKEGVDGNFLLRDSESIPGVLCLCVSFKNIVYTYRIFREKHGYYRIQNSNSDYVDVLP

SEQ ID NO: 2110 - protein, 111 aa, Artificial Sequence
  Description of Artificial Sequence:  Synthetic peptide
IPSNYIRMGDCSWYLGKITRNDAEVLLKKSNVRDGHFLVRQCESSPGEFSISVRFQDSVQHFKVLRDQNGKYYLWAVKFNSLNELVAYHRTASVSRTHTILLADMNVETKF

SEQ ID NO: 2111 - protein, 111 aa, Artificial Sequence
  Description of Artificial Sequence:  Synthetic peptide
YVAPVKSVQAQEWFFGKIKRADAEKKLLQTGNQTGTYLIRESESQPGNYSLSVRDGDSVKHYRIRKVDTGGFYIAPRCMCNSLEDLVQHYKGDSDGLCCRLTVICPKFDLP

SEQ ID NO: 2112 - protein, 125 aa, Artificial Sequence
  Description of Artificial Sequence:  Synthetic peptide
YVAEADTMETEEWFYKDITRKDAERQLLAPANKPGSYLIRESETSKGSYSLSIRDVDAQGQDVVKHYKIRSLDNGGYYISPKITFSDISSMIKHYHKQSDGLCRKLDKACEKPKAQKPWDKDAWE

SEQ ID NO: 2113 - protein, 113 aa, Artificial Sequence
  Description of Artificial Sequence:  Synthetic peptide
QPLICAEPTTERWFHGNLSAKEAEKLILERGKNGSFLVRESQSKLSDFVLSVRADDKVTHVMIRWHEKMYDVGGGQKFATLCDLIEHYKRNPMVETCGTVVHLRQPFNATRIT

SEQ ID NO: 2114 - protein, 116 aa, Artificial Sequence
  Description of Artificial Sequence:  Synthetic peptide
YVAPVDSIQAEEWYFGKMGRKDAERQLLAQNNPRGTFLIRESETTKGAYSLSIRDWDDAKGDHVKHYKIRKLDNGGYYITTRTQFDTVQQLVEHYTGSNDGLCCYLTKACPNTTPQ

SEQ ID NO: 2115 - protein, 115 aa, Artificial Sequence
  Description of Artificial Sequence:  Synthetic peptide
AGRAGPAMEALPIYHGGITREAGEKLLLAAGADGSYLLRDSESIPGVYCLCVLHQGYVYTYRVSKTESGSWSAETAPGVHRRLFRKMHNLISAFQKPDQGIVTPLKHPVINCAKA

SEQ ID NO: 2116 - protein, 113 aa, Artificial Sequence
  Description of Artificial Sequence:  Synthetic peptide
VNTPVPDLSMYTWYASPMERKEAEVLLANRSDGTYLVRQRVKDAGEFAISIKFNQEVKHMKVTSQGGLWRLTEKKGFKGLTDLIGYYQQNSLKDCFKLLDTTLQLPFKEPEKK

SEQ ID NO: 2117 - protein, 113 aa, Artificial Sequence
  Description of Artificial Sequence:  Synthetic peptide
AQSKRPHLTGKSWYYGAITRSQCDTVLNSHGHDGDYLIRDSETNLGDYSVSLKAPGRNKHFRVHVEGNMYCIGQRKFHTLDQLVDHYQRAPIYTNKQGEKLYLVRPLPKANGT

SEQ ID NO: 2118 - protein, 102 aa, Artificial Sequence
  Description of Artificial Sequence:  Synthetic peptide
RVDPSLPLEKQVWYHGSLSRSEAESLLTLCKECSYLVRNSETSRLDYSLSLRSCQGFMHMKFSQCKDGRYILGQNSPPFETIPEVIHYYTTHKLPIKGAEHL

SEQ ID NO: 2119 - protein, 139 aa, Artificial Sequence
  Description of Artificial Sequence:  Synthetic peptide
RQTYVKRVIVHPSFHNISFAEAEKLMQTMKQGEAIVRPSSKGADHLTVTWKVTDEVYQHIDVREEGKENAFSLGQSLWIGNEEFEDLDEIIARHVNPMAAYASELLDFKYYKATVEGIKDKAEDILKEQKKENPGGIPY

SEQ ID NO: 2120 - protein, 111 aa, Artificial Sequence
  Description of Artificial Sequence:  Synthetic peptide
TEKLSEADANLPYFHGALMNIDADQLLVNEGDFMVTMKKQLDINKLQLFLAVRLKKGIRRYEIKRTSKTAKIGGKTSQNIVKLINMLKADPIEIRGEKVVLKRAIPKGKFQ

SEQ ID NO: 2121 - protein, 114 aa, Artificial Sequence
  Description of Artificial Sequence:  Synthetic peptide
EEEELPHHDERSWFVGDLKRGEAEELLLGRPDGSFLVRESSRKGCYACSVVVEGVVTALRGAADADGGFGFAEPFDRHASLKELVLHYRRASLAQHNRALDVRLAFPVHAHTPS

SEQ ID NO: 2122 - protein, 100 aa, Artificial Sequence
  Description of Artificial Sequence:  Synthetic peptide
AGYQKTSDTIAPWFHGILTLKKANELLLSTGMPGSFLIRVSERIKGYALSYLSEDGCKHFLIDASADAYSFLGVDQLQHATLADLVEYHKVKQCINLVAF

SEQ ID NO: 2123 - protein, 139 aa, Artificial Sequence
  Description of Artificial Sequence:  Synthetic peptide
ANTRVKRVIAHPNFHNVSYEAATKMLDEMDWSECIIRPSANKDSGLSVTWKICDRVYHNFFVKESAKDQVFSIGRQLSVGGEDFEDLDELIARFVQPMIQISHEITTHKYFFPNGTCEETEAVEQFVREKKRELGRSPY

SEQ ID NO: 2124 - protein, 118 aa, Artificial Sequence
  Description of Artificial Sequence:  Synthetic peptide
MAGNFDSEERSSWYWGRLSRQEAVALLQGQRHGVFLVRDSSTSPGDYVLSVSENSRVSHYIINSSGPRPPNSAVGVSPSRLRIGDQEFDSLPALLEFYKIHYLDTTTLIEPVSRSRQG

SEQ ID NO: 2125 - protein, 122 aa, Artificial Sequence
  Description of Artificial Sequence:  Synthetic peptide
YVAPVDSIQAEDWYFGKLGRKDAERQLLSTGNPRGTYLIRESETTKGAFSLSIRDWDDVKGDHVKHYKIRKLDSGGYYITTRAQFETLQQLVQHYSEHADGLCFNLTGVCVNYIPDTVGLSH

SEQ ID NO: 2126 - protein, 107 aa, Artificial Sequence
  Description of Artificial Sequence:  Synthetic peptide
MDLPYYHGCLTKRACEALLLKGGADGNFLIRDSESVPGALCLCVSYKKLVYSYRIFREKHGYYRIQTEADVPRKIFPNLEELVSKYKKPDQGLVVHLSNPIMRTDLC

SEQ ID NO: 2127 - protein, 115 aa, Artificial Sequence
  Description of Artificial Sequence:  Synthetic peptide
VVETRDQLEHCQWYNKDITRSKAEQLLKQEGKEGAFLLRNSSQPGKYTMSVLSKAAGEQSGKVKHYTVCVTPSDQYYLAEKHAFTTIPELIKYHQHNAAGLVTRLRHPVSCHSTK

SEQ ID NO: 2128 - protein, 117 aa, Artificial Sequence
  Description of Artificial Sequence:  Synthetic peptide
YPLNSQDPTSERWYHGHLSGKEAEKLLLDKGKPGSFLVRESQSKPGDFVLSVLTSEEKLENGERKSRVTHVMIRFQPDGKYDVGGGERFDTLTDLLDHYKKNPMVEKSGAVVHLKQP

SEQ ID NO: 2129 - protein, 109 aa, Artificial Sequence
  Description of Artificial Sequence:  Synthetic peptide
FLVIKDLHLLQPWYHHTIRRYEAESRLASEGNQDGAFLVRYRKEDRTYVLSLTSQNEPKHYRIEEYLSRWSIEGGQYFETIMELIDHYHFRQDGLLCKLQKPIPVSNFT

SEQ ID NO: 2130 - protein, 114 aa, Artificial Sequence
  Description of Artificial Sequence:  Synthetic peptide
MVDKDIHSEHWYHGLLPREDIKAMLRKNGDFLVRSTEPKAGEPRQYVLSAMQSEELEDAGVKHYVMRLNSSNQIFLEAKGFETIASLVNYYMSSKEPIKKLTVLKTPILKQPWE

SEQ ID NO: 2131 - protein, 136 aa, Artificial Sequence
  Description of Artificial Sequence:  Synthetic peptide
NAKLAKTRNIQHPFYRNFNYKQAEEYLAPQNVGDYVIRPSSKGASYLTITWKVGNNLFQHLLVEERSRGRFKEYIVDGKTYEDLDQLAFQHIQVIAKNVTDMVRHPKFREGTLSVVHEWLESYTRANPKSSAYVFC

SEQ ID NO: 2132 - protein, 108 aa, Artificial Sequence
  Description of Artificial Sequence:  Synthetic peptide
ALSTDPKLSLMPWFHGKISGQEAIQQLQPPEDGLFLVRESARHPGDYVLCVSFGRDVIHYRVLHRDGHLTIDEAVCFCNLMDMVEHYTKDKGAICTKLVKPRRKQGAK

SEQ ID NO: 2133 - protein, 108 aa, Artificial Sequence
  Description of Artificial Sequence:  Synthetic peptide
MPDPAAHLPFFYGSISRAEAEEHLKLAGMADGLFLLRQCLRSLGGYVLSLVHEVRFHHFPIERQLNGTYAIAGGKAHCGPAELCEFYSRDPDGLPCNLRKPCNRPSGL

SEQ ID NO: 2134 - protein, 108 aa, Artificial Sequence
  Description of Artificial Sequence:  Synthetic peptide
MADSANHLPFFFGQITREEAEDYLVQGGMSDGLYLLRQSRNYLGGFALSVAYDRKAHHYTIERELNGTYAISGGRTHGSPAELCHYHSQELDGLVCLLKNPFNRPPGV

SEQ ID NO: 2135 - protein, 114 aa, Artificial Sequence
  Description of Artificial Sequence:  Synthetic peptide
SKENSVSLQDAEWYWGDISREEVNDKLRDMPDGTFLVRDASTKVQGDYTLTLRKGGNNKLIKIYHQDGKYGFSDPLTFNSVVELINHYRNESLAQYNPKLDVKLLYPVSRYQQD

SEQ ID NO: 2136 - protein, 111 aa, Artificial Sequence
  Description of Artificial Sequence:  Synthetic peptide
ASNMANPANHLPYFFGNITREEAEEYLMQGGMSDGLYLLRQSRNYLGGFALSLAYGRKVHHYTIERELSGTYAIAGGKSHASPAELINYHSEEADGLICLLRKSFNRPPGV

SEQ ID NO: 2137 - protein, 108 aa, Artificial Sequence
  Description of Artificial Sequence:  Synthetic peptide
AIRADPKLSLMPWFHGKISGVEAVQELQPPEDGLFLVRESVRHPGDYVLCVSFGKEVIHYRVLHRENTLSIDSEQYFCNLIDMIEHYTEQQGALCTKLVKPKAKSGMK

SEQ ID NO: 2138 - protein, 109 aa, Artificial Sequence
  Description of Artificial Sequence:  Synthetic peptide
IVELTKAEAEHNWWEGRNTATNEVGWFPCNRVHPYVHGPPQDLSVHLWYNVEVKHIKIMTSEGLYRITEKKAFRGLLELVEFYQQNSLKDCFKSLDTTLQFPYKEPERR

SEQ ID NO: 2139 - protein, 101 aa, Artificial Sequence
  Description of Artificial Sequence:  Synthetic peptide
SIGVYGPPHYGDEFHGPVSREEADRLLTNGGDGSYLIRESLRARGSFTLGLRLLGATKHFRLYFDGQHYVADKRFDTVHDLVADGLITMYVETKAADYIGR

SEQ ID NO: 2140 - protein, 118 aa, Artificial Sequence
  Description of Artificial Sequence:  Synthetic peptide
EEYFIVDCSEPNWWTVKDKDGHYLKTDNKDGGFMVRNSKHAGVYTVSIFTRVSGSNGEKCPQVKHYQIKVQSEGEKVLYYLAEKYLFPTIPELIRYHQHNPAGLITRLRHCVSRNVPN

SEQ ID NO: 2141 - protein, 116 aa, Artificial Sequence
  Description of Artificial Sequence:  Synthetic peptide
YVAPVDSIQAEDWYFGKLGRKDAERQLLSTGNPRGTFLIRESETTKGAFSLSIRDWDDVKGDHVKHYKIRKLDSGGYYITTRAQFETLQQLVQHYTERAAGLCCRLVVPCHKGMPR

SEQ ID NO: 2142 - protein, 108 aa, Artificial Sequence
  Description of Artificial Sequence:  Synthetic peptide
MPDAAAHLPFYYGSIARSEAEEYLKLAGMSDGLFLLRQCLRSLGGYVLSMVCNLQFYHYAIERQMNGTYAIAGGKAHCGPEELCEFYSKDADGLCCTLRKPCNRPSGV

SEQ ID NO: 2143 - protein, 115 aa, Artificial Sequence
  Description of Artificial Sequence:  Synthetic peptide
CQKTDHFLSCYPWFHGPISRVKAAQLVQLQGPDAHGVFLVRQSETRRGEYVLTFNFQGIAKHLRLSLTERGQCRVQHLHFPSVVDMLHHFQRSPIPLECGAACDVRLSSYVVVVS

SEQ ID NO: 2144 - protein, 117 aa, Artificial Sequence
  Description of Artificial Sequence:  Synthetic peptide
NETPTPTIEKEAYFHGLIQREDVFQLLDNNGDYVVRLSDPKPGEPRSYILSVMFNNKLDENSSVKHFVINSVENKYFVNNNMSFNTIQQMLSHYQKSRTEILEACKILHPVRRQFWE

SEQ ID NO: 2145 - protein, 128 aa, Artificial Sequence
  Description of Artificial Sequence:  Synthetic peptide
TKFDEKDAQQNEWYIGDYSRQAVEEVLMRESKDGTFLVRDCSTKSKAEPYVLVVFYGNKVYNVKIRFLESNQQFALGTGLRGNEMFDSVEDIIEHHMYFPIVLIDGKDKAAHREQCYLTQPLPLARHL

SEQ ID NO: 2146 - protein, 109 aa, Artificial Sequence
  Description of Artificial Sequence:  Synthetic peptide
DFNMKSEDLDQPWFHKEATRDVAITLLNNKPTGSFLIRPSSQAGSYAMSWMKNGNEIGHNLIYGLCPGYSLKQNSTTDRFWSLQKLVEDCDYLKLPIQVSQTTKNIAKH

SEQ ID NO: 2147 - protein, 111 aa, Artificial Sequence
  Description of Artificial Sequence:  Synthetic peptide
YLAEKETVESEPWFFGCISRSEAMHRLQAEDNSKGAFLIRVSQKPGADYVLSVRDAQAVRHYRIWKNNEGRLHLNEAVSFSNLSELVDYHKTQSLSHGLQLSMPCWKHKTE

SEQ ID NO: 2148 - protein, 113 aa, Artificial Sequence
  Description of Artificial Sequence:  Synthetic peptide
KLIATTAHEKMPWFHGKIEREDSEQRLLRSSNVNGKFLIRQRENNGRNVSFALCLLHNNQVMHYRIDKDKAGKLSIPDGKKFDTLWQLVEHYSYKPDGLLRVLTETCPRPSHN

SEQ ID NO: 2149 - protein, 113 aa, Artificial Sequence
  Description of Artificial Sequence:  Synthetic peptide
SAGVAHNLMEQGWFWGDADRSTVSQALSDQPDGSFVVRNASQPGDYTLSVKYNNQVKLLRIAVKDGKCGFNTDQLTHDSVIKLIEFHRNISLNVFNDSLDVRLLYPVSVRRNS

SEQ ID NO: 2150 - protein, 110 aa, Artificial Sequence
  Description of Artificial Sequence:  Synthetic peptide
VHRLGATGNLPAWFHGFISRRDTEQMLQDEPLGCFLVRFSESTVGFVLSYRGRERCRHFVLDQLPNGHYVILGEHSAHPELAELLQHYARIPIPPYGELLTVPRGQDKAC

SEQ ID NO: 2151 - protein, 119 aa, Artificial Sequence
  Description of Artificial Sequence:  Synthetic peptide
KEKELLGLQKYDWYVGDMSRQRAESLLKQNDKEGCFVVRKSSTKGLYTLSLHTKVPQSHVKHYHIKQNARSEFYLSEKHCCETIPDLINYHRHNSGGLACRLKTSPCDRPVPPTAGLSH

SEQ ID NO: 2152 - protein, 110 aa, Artificial Sequence
  Description of Artificial Sequence:  Synthetic peptide
QAHWLLLRTAPLWFHGFITRREAERLLQSQPLGCYLVRFSESAVTFVLSYRSRTCCRHFLLAQLGDGRHVVLGEDSAHSQLQDLLQHYTECPLSPYGEMLTQPLARQTAE

SEQ ID NO: 2153 - protein, 138 aa, Artificial Sequence
  Description of Artificial Sequence:  Synthetic peptide
RRSDGKDVQHNEWYIGEYSRQAVEEALMKENKDGTFLVRDCSAKSRAEPYVLVVFYGNKVYNVKIRFLERNQQFALGTGLRGDEFPTTLVGGTLLWRPKKTGTVGNQNCHTDTYCSSIDTKTTVAKAAKMLQEGTSVD

SEQ ID NO: 2154 - protein, 112 aa, Artificial Sequence
  Description of Artificial Sequence:  Synthetic peptide
SILDRLLHTHPIWLQLSLSEEEAAEVLQAQPPGIFLVRKSSKMQKKVLSLRLPCEFGAPLKEFTIKESTYTFSLEGSGISFADLFRLIAFYCISRDVLPFTLKLPYAISTAK

SEQ ID NO: 2155 - protein, 113 aa, Artificial Sequence
  Description of Artificial Sequence:  Synthetic peptide
EDEDLPHQDERTWNVGNINRNQAENLLRGKRDGTFLVRESSKAGCYACSVMADGEVKHCVINKTHTGFGFAEPYNLYSSLKELVLHYQQTSLVQHNDSLNVTLAHPVYAQQRR

SEQ ID NO: 2156 - protein, 114 aa, Artificial Sequence
  Description of Artificial Sequence:  Synthetic peptide
SSLSAAIHRTQVWFHGRIVREEAHKMIIQQGQVDGLFLLRDSQSNPRAFVLTLCHHQKIKHFQILPCEEDGQVFFSLDDGSTKFTDLIHLVDFYQLNRGVLPCKLKHPCTAVAL

SEQ ID NO: 2157 - protein, 107 aa, Artificial Sequence
  Description of Artificial Sequence:  Synthetic peptide
MSSRRWFHPTISGIEAEKLLQEQGFDGSFLARLSSSNPGAFTLSVRRGNEVTHIKIQNNGDFFDLYGGEKFATLPELVQYYMENGELKEKNGQAIELKQPLICAEPT

SEQ ID NO: 2158 - protein, 133 aa, Artificial Sequence
  Description of Artificial Sequence:  Synthetic peptide
YPLNCSDPTTERWYHGHLSGVAAESLLQAKATPWTFLVRESLSKPGDFVLSVLTDQPKPGSDAPPAGATSASGARLKVTHIKIMCENGRYTVGGSEKFDSLADLVEHFKKTGIEEVSGSFVYLKQPYYATRVN

SEQ ID NO: 2159 - protein, 103 aa, Artificial Sequence
  Description of Artificial Sequence:  Synthetic peptide
LIDASIPLDRQGWYHGSISRIDAEKILRPLSEGSFLVRNSESTRQDYSLTLKSAKGFMHMRIQRDADSGQFILGQFSRPFPTIPDMIRHFCLNRLPVRGAEHM

SEQ ID NO: 2160 - protein, 130 aa, Artificial Sequence
  Description of Artificial Sequence:  Synthetic peptide
LTRLLSSGWYWGSLTANEAKEILQDTSEGTFLLRDSSQRDYLFTISAMTSAGPTNLRIEYKHGKFKLDSVVLLKPKLKQFDSVVHLVEHYVQLSRTGSHKAPPALQPRTPPPNGTVQLLLTTPVYTATPT

SEQ ID NO: 2161 - protein, 108 aa, Artificial Sequence
  Description of Artificial Sequence:  Synthetic peptide
VPEVQKPLHEQVWYHGAIPRTEVAELLTHSGDFLVRESQGKQEYVLSVLWDGQPRHFIIQSADNLYRLEGDGFPSIPLLIDHLLRSQQPLTKKSGIILNRAVPKDKWA

SEQ ID NO: 2162 - protein, 122 aa, Artificial Sequence
  Description of Artificial Sequence:  Synthetic peptide
YVAPVDSIQAEEWYFGKLGRKDAERQLLSFGNPRGTFLIRESETTKGAYSLSIRDWDDMKGDHVKHYKIRKLDNGGYYITTRAQFETLQQLVQHYSEKADGLCFNLTVIATNNTPQTVGLAK

SEQ ID NO: 2163 - protein, 122 aa, Artificial Sequence
  Description of Artificial Sequence:  Synthetic peptide
YVAPMNSIQSKDWFFGKIGRKDAERLLLSEGNPRGTFMIRESETTKGAYSLSVRDWDASRGDHAKHYKIRKLDSGGFYITTRVQFNTVEELVEHYGEFNDGLCHLLTSPCINQKPQTLGLAK

SEQ ID NO: 2164 - protein, 120 aa, Artificial Sequence
  Description of Artificial Sequence:  Synthetic peptide
YVAPVDSIQAEEWYFGKMGRKDAERQLLAHGNQRGTFLIRESETTKGEHSHAHTLRQLPGRGLYVGYTSVPLHSRFPGAYSLSIRDWDDNKGDHVKHYKIRKLDNGGYYITTSCKRGMPK

SEQ ID NO: 2165 - protein, 109 aa, Artificial Sequence
  Description of Artificial Sequence:  Synthetic peptide
LSLLEPSLLSYSWYHGAVSRQAGEHLLRSGITGSFLVRASESAPGQLSVTVRHLGRVYHYRISQDSRGLFYITEAHRFPTVVQLIEHHSRSADGLVCPLLYSVPKPQFL

SEQ ID NO: 2166 - protein, 111 aa, Artificial Sequence
  Description of Artificial Sequence:  Synthetic peptide
YVAEYKSLDAEEWFLGKIKRVEAEKILNQSFNQIGSFLIRDSETTPGDFSLSVKDQDRVRHYRIRRLEDGSLFVTRRSTFQGLHELVEHYKTNTDGLCCNLLYPCLQAEKP

SEQ ID NO: 2167 - protein, 115 aa, Artificial Sequence
  Description of Artificial Sequence:  Synthetic peptide
TENRLTNLETYEWYHKNITRDQTERLLRQEAKEGAFIVRDSRHLGSYTISVFTRARRHTQSSIKHYQIKKNDSGQWYVTERHLFPSVPELIQYHQYNAAGLMSRLRYPVGLLGSC

SEQ ID NO: 2168 - protein, 111 aa, Artificial Sequence
  Description of Artificial Sequence:  Synthetic peptide
RILRHCPPQYGVEYHGPISRQETEELLSNAQDGSYLIRDSQRAENAYTLVIWFDKMAKNFKLYFDPKTMQHYVGETKFDTVELLVADGLIHFYVETRGADVLKKIAEANIY

SEQ ID NO: 2169 - protein, 125 aa, Artificial Sequence
  Description of Artificial Sequence:  Synthetic peptide
KSKHVQPHWLDRGCVGFICKNESQEALIQKPGGSFLLRYSDSEIGGLTIAWVSENDNKQKQPHTSKDFTVRGLADRIRDLEQLHFVYTQDERIVGKEEMFSRYYSKSPNPPSQPNDGYVKAEIQV

SEQ ID NO: 2170 - protein, 110 aa, Artificial Sequence
  Description of Artificial Sequence:  Synthetic peptide
NQPTELRLEEEEFYHGALPRKETEALLVNDGDFVVREKSDAWGRYVLSAKHASKVRHFPIQINDENMYRLEGDAFQTVGELIRFQLNSRQPVTKASQAILLKPVCRVRNE

SEQ ID NO: 2171 - protein, 108 aa, Artificial Sequence
  Description of Artificial Sequence:  Synthetic peptide
MADPSLLRWFHGRITRDIAENCLQTTTSMDDGTYLLRESASEIGSYVLSVCKDKKVIHYAIQRQPSGMVGIADGPQFPGPVELVNHHKTSLGGLMTKLTYPCERPAGV

SEQ ID NO: 2172 - protein, 118 aa, Artificial Sequence
  Description of Artificial Sequence:  Synthetic peptide
LKLSSCNLSSHGWYHGRIPWEVSESLVQQEGDFLIRDSLSSIGDYVLTCRWNQKALHFLITKVLLRSYDTYTRVQYILEEETFYSVPALVHSYVGNKRPLTKKSAAYIYSPVNRTLPL

SEQ ID NO: 2173 - protein, 114 aa, Artificial Sequence
  Description of Artificial Sequence:  Synthetic peptide
LVPDLRSITACSFYWGKMDRYEAERLLEGKQEGTFLLRDSAQEEFIFSVSFRKYGRSLHARIEQWNHKFSFDSHDPGVYASETVCGLIEHYKHPSCSMFFEPMLTIPFHRNFAF

SEQ ID NO: 2174 - protein, 108 aa, Artificial Sequence
  Description of Artificial Sequence:  Synthetic peptide
PVPNPNPHESKPWYYDGLSRGEAEDMLMRVPRDGAFLIRRREGTDSYAITFRARGKVKHCRIHRDGQHFVLGTSAYFESLVELVSYYEKHALYRKMRLRYPVTPELLE

SEQ ID NO: 2175 - protein, 117 aa, Artificial Sequence
  Description of Artificial Sequence:  Synthetic peptide
IKKHLVNLWKEGLIMGFVSRKGTKELLRDKENGTFLLRFSESSKEGAITFSWVEHINGELCGVPVETQVHAVQPYTSNELSLMSLPRILHHFNVKSQNCSSGNPLLYLYPRIPKDSV

SEQ ID NO: 2176 - protein, 127 aa, Artificial Sequence
  Description of Artificial Sequence:  Synthetic peptide
YQRHVCSMWQSGLIYGFISRQSVEEALRNEEQGTFLIRFSERHAGHFAVGYKVDDPDPEKRIRHYLVKADDTAGAKKTLPDFLSECPQFTKILQLTIDVSTGEPRLRNFPKDVVLEPYYSKRETLPA

SEQ ID NO: 2177 - protein, 118 aa, Artificial Sequence
  Description of Artificial Sequence:  Synthetic peptide
LKLSSTDLRSHAWYHGRIPREVSESLVQRNGDFLIRDSLTSVGDYVLTCRWRNEPLHFKINKVTVKSSDGRTRVQYLFEQESFDNVPALVRFYVGNRKAISEQSGAIVYCPINRTFPL

SEQ ID NO: 2178 - protein, 118 aa, Artificial Sequence
  Description of Artificial Sequence:  Synthetic peptide
LKLSSEEPRSHAWYHGAIPRQVAENLVQRDGDFLIRDSLSSPGNYVLTCQWKNSPQHFKINKRVVAMNEAYSRVQYLFEKEGFDSIPALVRYYVGNREPVSEVIGAIIFQPINRALPL

SEQ ID NO: 2179 - protein, 124 aa, Artificial Sequence
  Description of Artificial Sequence:  Synthetic peptide
VAPPAVLENIHSNCHGPISMVFAISKLKRAGNQTGLYVLRCSPKDFNKYFLTFAVERENVIEYKHCLITKNENGEYNLSGTKRNFSSLKDLLNCYQMETVRSDSIIFQLTKCCPPKPKDKSNLL

SEQ ID NO: 2180 - protein, 111 aa, Artificial Sequence
  Description of Artificial Sequence:  Synthetic peptide
AGSAVDSANHLTYFFGNITREEAEDYLVQGGMTDGLYLLRQSRNYLGGFALSVAHNRKAHHYTIERELNGTYAISGGRAHASPADLCHYHSQEPDGLICLLKKPFNRPPGV

SEQ ID NO: 2181 - protein, 108 aa, Artificial Sequence
  Description of Artificial Sequence:  Synthetic peptide
VPEVQKPLHEQLWYHGAIPRAEVAELLTHSGDFLVRESQGKQEYVLSVLWDGQPRHFIIQSSDNLYRLEGDGFPSIPLLITHLLSSQQPLTKKSGVVLFRAVPKDKWV

SEQ ID NO: 2182 - protein, 110 aa, Artificial Sequence
  Description of Artificial Sequence:  Synthetic peptide
MRQIGGRWFHHNLTGLEAEKLLSLKGVSGSFLARPSHSTPGSFTLSVRRGDEVTHIRIQNTEEFLDLYGGEKFATLSELVTYYMENEGQLREKNGDLIELKYPLISEDPT

SEQ ID NO: 2183 - protein, 115 aa, Artificial Sequence
  Description of Artificial Sequence:  Synthetic peptide
YRDIRRLPTDLPYYHGPLSKKDCETLLLKDGIDGNFLLRDSESLPGVLCLCVSFKNLVYTYRIFEERRGFYNIQTVEGAPKEIFPNLKELISKFEKPSQGLVMHLIQPIKKASSC

SEQ ID NO: 2184 - protein, 107 aa, Artificial Sequence
  Description of Artificial Sequence:  Synthetic peptide
FSGRERSMEQEPWFFGRISRERAEELLQYARSGEFLVRDSESHPGDLSISVRGTERNKHFKVQTIDGQLRIGNRTFPNMHALISHYTTNPCFSSATEKLYLTSPLPK

SEQ ID NO: 2185 - protein, 114 aa, Artificial Sequence
  Description of Artificial Sequence:  Synthetic peptide
SIVQNLPSLEQYYHGYIDRAEAEKRLQSFGISNSYLLRLSRADHGSDTWEDIYVLSYLSSALACFHFRLIPRFNCFQLGGRFFDSIDGCLSRYYTRDIMTGERLKHPIPPTSLP

SEQ ID NO: 2186 - protein, 113 aa, Artificial Sequence
  Description of Artificial Sequence:  Synthetic peptide
SLRERLLLTRPVWLQLRANEAAALHVLRTEPPGTFLVRKSNSRQCQALCVRLPEASGPSFVSSHCIQETAEGVSLEGSELVFLDLVQLICAYCHTRDILLLPLQLPRAIRQAA

SEQ ID NO: 2187 - protein, 109 aa, Artificial Sequence
  Description of Artificial Sequence:  Synthetic peptide
VGREEDPHEGKIWYHRKISKQEAYNLLLTVGQVCSFLVRPSDNTPGDYSLFFRTNENIQRFKISPTPNNQYMMGGRYYNSMVVMFQAELGMSYGNPSLLFLDSNKPVLG

SEQ ID NO: 2188 - protein, 118 aa, Artificial Sequence
  Description of Artificial Sequence:  Synthetic peptide
TAPPSILEGIKNHCHGPITSEFAVNKLKKWGSEDGTFLLRKSPQDYGEFFLTVSAAGTPLGLDYKDCLVIKNKHYSLPGVSKSFSSLKELTVYYQQNKLLLADVPVRLSRCCPPRSQE

SEQ ID NO: 2189 - protein, 112 aa, Artificial Sequence
  Description of Artificial Sequence:  Synthetic peptide
AQLAKTRNIQHPLFHNFSYKQAEEFLAPQAVGDCVLRPSSKGPNYLTVTWKVSNNLFQHLSIQENTQGMGKEYIVEHKKYADLDQLIFQHVQAIAKHVDEMCRHPKFREGTM

SEQ ID NO: 2190 - protein, 113 aa, Artificial Sequence
  Description of Artificial Sequence:  Synthetic peptide
KLIATTAHERMPWYHSSLTREEAERKLYSGSQTDGKFLTQTRRRLRPRKEPGTYALSLIYGKTVYHYLISQDKAGKYCIPEGTKFDTLWQLVEYLKLKADGLIYCLKEACPNS

SEQ ID NO: 2191 - protein, 104 aa, Artificial Sequence
  Description of Artificial Sequence:  Synthetic peptide
AVPNPSPHENKDWYYSNLSRGEAEDMLMRIPRDGAFLIRKRDEPDSFAMTFRAEGKVKHFRIQQEGRHFVLGTSAYFESLVELVTYYEKHPLYRKMKLRYPVTE

SEQ ID NO: 2192 - protein, 106 aa, Artificial Sequence
  Description of Artificial Sequence:  Synthetic peptide
IPKNYIEMKPHPWFFGKIPRAKAEEMLSKQRHDGAFLIRESESAPGDFSLSVNNRRTSRPSLTLIPRRMESWDSVGETLSTSWITQTPTGGKGPAMGKPACFPAIT

SEQ ID NO: 2193 - protein, 110 aa, Artificial Sequence
  Description of Artificial Sequence:  Synthetic peptide
VRKLTRDGSFPHWFHGMITRRQAEDLLIDKPLGCFLVRVGQSREGFTLTFRGADRCRHYMVEMQSNGKYVILGEDRAHSSLTDLVQYHTQVGIKPFMELLTVPCGQMCDQ

SEQ ID NO: 2194 - protein, 115 aa, Artificial Sequence
  Description of Artificial Sequence:  Synthetic peptide
FRFPPAAAMDQCWYHGNITRSRAEDLLSKVGKDGSFLVRASESIASAYALCVLFRNCVYTYRILPDKEKKLIVQASEGVPVKYFDNLEELIEFYKKENMGLVWHLKYPVQREEEE

SEQ ID NO: 2195 - protein, 113 aa, Artificial Sequence
  Description of Artificial Sequence:  Synthetic peptide
PHGVTHSLMEQGWYWADADRSAVSKALSDQPDGSFIVRNASTPGDYTLSVKFAAQVKLLRIVVKDGKCGFNTDSLTHDSVVRLIEFHRNISLNIFNDALDVRLLYPVSVRRNS

SEQ ID NO: 2196 - protein, 118 aa, Artificial Sequence
  Description of Artificial Sequence:  Synthetic peptide
VPANYISLCPHPWYIPKCSRREAEARLLETDPNTHRDVQPDGAFVLRQSENDPGHFSISVKEGSSVLHFRIFFDPSGKYYIWTNKFSSINALIDYHRHQTIYGIKALLLRDCVSSKIF

SEQ ID NO: 2197 - protein, 118 aa, Artificial Sequence
  Description of Artificial Sequence:  Synthetic peptide
LLLSSEDLRSHAWYHGRIPRQVSENLMQRDGDFLVRDSLSSPGDFVLTCQWKNLPQHFKIRRTVVRLSEAYSRVQYQFEMESFDSIPGLVRCYVGNRRPISQQSGAIIFQPVNRTVPL

SEQ ID NO: 2198 - protein, 125 aa, Artificial Sequence
  Description of Artificial Sequence:  Synthetic peptide
ECNNNEQHCAERWFHGKLGGGRDGRQVAEKLLQEYCEGGAKDGTFLVRESETFVGDYTLSFWRSGRVQHCRIHSRQESGSTRFYLTDNLVFDSLYRLICHYRDTPLRCNEFEMRLGNPVPQPNAH

SEQ ID NO: 2199 - protein, 114 aa, Artificial Sequence
  Description of Artificial Sequence:  Synthetic peptide
SVLEKLVKTCPVWLQLGIGQAEAAKILQQEMAGMFLVCRDSSLKRLVLCVHFPSLKNTSTEVLEYPIKEEKSILYLEGSVLVFEDIFRLIAFYCVSRDLLPFTLRLPQAILEAS

SEQ ID NO: 2200 - protein, 133 aa, Artificial Sequence
  Description of Artificial Sequence:  Synthetic peptide
SSHHSSVANNQPWFHSMISRENTEKLLRGKPDGTFLVRESTNFPGDFTLCMAYHGKVEHYRIEQTSGGQLTCDKEEYFSNLTQLVSVSHFVLGWGKNYKKNRESISKHSQHYKRDADGLCHRLVTPIICETAT

SEQ ID NO: 2201 - protein, 115 aa, Artificial Sequence
  Description of Artificial Sequence:  Synthetic peptide
VVEAENGLERFDWFCKNTNRSQAEKLLRTENKDGGFLVRDSSRPGKYTVSLLSKSGGDTGASCRHYNICTTPQGHFYLAEKHYFSTIPELIVYHQHNAAGMVSRLKYIVTTRMRP

SEQ ID NO: 2202 - protein, 123 aa, Artificial Sequence
  Description of Artificial Sequence:  Synthetic peptide
YVAPSDSIQAEEWYFGKITRRESERLLLNAENPRGTFLVRESETTKAEHPCHAQNLTECCGLGGGGGWAWGHCSSLIPPSGAYCLSVSDFDNAKGLNVKHYKIRKLDSGGFYITSSCNQRLPQ

SEQ ID NO: 2203 - protein, 113 aa, Artificial Sequence
  Description of Artificial Sequence:  Synthetic peptide
SLRERLLLTRPVWLQLQANAAAALHMLRTEPPGTFLVRKSNTRQCQALCMRLPEASGPSFVSSHYILESPGGVSLEGSELMFPDLVQLICAYCHTRDILLLPLQLPRAIHHAA

SEQ ID NO: 2204 - protein, 108 aa, Artificial Sequence
  Description of Artificial Sequence:  Synthetic peptide
MVDKVHLLPYFFGNITREESEVYLQQGGSGDGLYLLRQSRSFLGGYALSLSYGRQFYHYTIERELNDTYAIAGGKSHRTPIDVINYHSQESDGLICLLKKPFHRPRGT

SEQ ID NO: 2205 - protein, 117 aa, Artificial Sequence
  Description of Artificial Sequence:  Synthetic peptide
YVAPVDSMKREDWYFGKCARKDAEKKLIAIGINKGQFIVRDGEANPGTFSLSVRDNDPQKGDHVKHYRIRKMDGGNGFFITQRSVFPTLSELVRHYQSNIDGLCCILSRACPKENPN

SEQ ID NO: 2206 - protein, 125 aa, Artificial Sequence
  Description of Artificial Sequence:  Synthetic peptide
FSILEKKLREFNFYHGFLPREDLHTTLHNPGDFLLRVSEVVEGEHKVNREVILSLIPVSTVSKDEEDRKKVRNVVIKRVTNLFFCEITRTFESISDLVTYYTKNPGGCASGTFQLKHPILQQSWE

SEQ ID NO: 2207 - protein, 124 aa, Artificial Sequence
  Description of Artificial Sequence:  Synthetic peptide
EEKISKWLVDQRCYHGFLPREDLPYVLKKKGDYIFRVTERKVGKDRKRDIVLSLAWPTEPVPMITNKDIKNFLIERNANTVWLELNMYFHSIEALYSHYKTNEIVNKNKERYKLIRPAGLFSWE

SEQ ID NO: 2208 - protein, 102 aa, Artificial Sequence
  Description of Artificial Sequence:  Synthetic peptide
TKKHLKPHWNDGAILGFVNKQQAQDMLMSKPNGTFLLRFSDSEIGGITIAWVAENPNKAGERMVWNLMPYTTKDFSIRSLADRISDLNHLLFLYPDRPKDEV

SEQ ID NO: 2209 - protein, 118 aa, Artificial Sequence
  Description of Artificial Sequence:  Synthetic peptide
LSLDSRDLRSHAWYHGPIPRQRAEEIVQKEGDFLVRDCVSQPGNYVLTCRTKGPTLHFVINKLLLQPETVYERVQYQFEDDAYDTVPDLITFYVGSGKSISVASGARIQFPCNRTYPL

SEQ ID NO: 2210 - protein, 115 aa, Artificial Sequence
  Description of Artificial Sequence:  Synthetic peptide
ADGGSDLFQDLGWYHSNLTRHAAEALLLSNGRDGSYLLRDSNEQTGLYSLSVRAKDSVKHFHVEYTGYSFKFGFNEYSSLKDFVKHFANQPLIGSETVNSGVVFLLISVARGLIQ

SEQ ID NO: 2211 - protein, 110 aa, Artificial Sequence
  Description of Artificial Sequence:  Synthetic peptide
VLLEFVTAARMHWFHGKLSRREAEALLQLNGDFLVRESTTTPGQYVLTGLQSGQPKHLLLVDPEGVVRTKDHRFESVSHLISYHMDNHLPIISAGSELCLEQPVGSHSGS

SEQ ID NO: 2212 - protein, 119 aa, Artificial Sequence
  Description of Artificial Sequence:  Synthetic peptide
MPRLALRQYNYYYRVNGEKAEQLLKDYGDNGDFLVRYSESNPQNFSISVRVSENKILHIKVMKFENDMLSIFDDQRTTPNEFSSITELLEFYMEFPEKLREKNGLFLELKKPVHVPYQL

SEQ ID NO: 2213 - protein, 112 aa, Artificial Sequence
  Description of Artificial Sequence:  Synthetic peptide
SILDKLLHTHPVWLQLGLNDTEATEILRAQPPGIFLVRKSSKLLKKVISLRLPGDCGSCLKEFAIKESTYTFSLEGSGISFADLFRLIAFYCISRDVLPFTLKLPHAIAAAK

SEQ ID NO: 2214 - protein, 138 aa, Artificial Sequence
  Description of Artificial Sequence:  Synthetic peptide
KIYARRVIAHPSFFNKSYAEVVAMLAEADQGEVALRPSSKSKDHLTATWKVADDIFQHIDVREEGKENDFSLGRSLWIGTEEFEDLDEIIARHIMPMALAARELIQYKYYKPNMVTGDENERDVMEKLLREEKANDPK

SEQ ID NO: 2215 - protein, 125 aa, Artificial Sequence
  Description of Artificial Sequence:  Synthetic peptide
MAGQFDSEDRGSWYWGRLSRGDAVSLLQGQRHGTFLVRDSGSIPGDFVLSVSESSRVSHYIVNSLGPAGGRRAGGEGPGAPGLNPTRFLIGDQVFDSLPSLLEFYKIHYLDTTTLIEPVSRSRQN

SEQ ID NO: 2216 - protein, 108 aa, Artificial Sequence
  Description of Artificial Sequence:  Synthetic peptide
GQEVERPLEQQTWYHGAIPRLEVQQLLTKDGDFLVRKSQEKPGYVLSVHWSGACKHFLVQNKDNMYCLDGESFHTIPQLIQQYQTSQQHVTKKSEVVLRRPVLKDKWV

SEQ ID NO: 2217 - protein, 120 aa, Artificial Sequence
  Description of Artificial Sequence:  Synthetic peptide
EAMQHVEHTPLQWFFGAIRRSDAEKQLLYSKNKTGAFLIRESESQKGEFSLSVLDGGVVKHYRIRRLDEGGFFLTRRITFSTLNEFVSHYTKTSDGLCVKLGKPCLKIQVPAPFDLSYKT

SEQ ID NO: 2218 - protein, 126 aa, Artificial Sequence
  Description of Artificial Sequence:  Synthetic peptide
LTEELKKLAKQGWYWGPITRWEAEGKLANVPDGSFLVRDSSDDRYLLSLSFRSHGKTLHTRIEHSNGRFSFYEQPDVEGHTSIVDLIEHSIRDSENGAFCYSRSRLPGSATYPVRLTNPVSRFMQV

SEQ ID NO: 2219 - protein, 124 aa, Artificial Sequence
  Description of Artificial Sequence:  Synthetic peptide
IAPPSLVRLVKNRCHGPIPLSKAKQKIEETGRQEGVYLIRQNPEDHYSYCLTVRIHANQELKNFKINCYEDDDQVGLDNQRRFNCLRSFVEFYRSRENSWCLEGQLRKGVPIEPKDPALRILDR

SEQ ID NO: 2220 - protein, 118 aa, Artificial Sequence
  Description of Artificial Sequence:  Synthetic peptide
VEKSPNSLETYEWYNKSISRDKAEKLLLDTGKEGAFMVRDSRTPGTYTVSVFTKAIVSENNPCIKHYHIKETNDNPKRYYVAEKYVFDSIPLLINYHQHNGAGLVTRLRHPVCSWRQK

SEQ ID NO: 2221 - protein, 108 aa, Artificial Sequence
  Description of Artificial Sequence:  Synthetic peptide
GPSASGRFAGNPWYYGKVTRHQAEMALNERGNEGDFLIRDSESSPNDFSVSLKAQGKNKHFKVQMKDCVYCIGQRKFSSLEELVEHYKKAPIFTSEQGEKLYLIKALS

SEQ ID NO: 2222 - protein, 115 aa, Artificial Sequence
  Description of Artificial Sequence:  Synthetic peptide
NFIAMSTMETEAWFFKNISRNEATRRLMAPGNTQGSFLVRESETTPGSYSLSMRDFDNNGDGVKHYRIRNMDNGGFYITTKISFNSLKELVQHYSRDSDGLCTKLVKPCQSKAPQ

SEQ ID NO: 2223 - protein, 102 aa, Artificial Sequence
  Description of Artificial Sequence:  Synthetic peptide
YQRHVCSMWQSGLIYGFISRQSVEEALRNEEQGTFLIRFSERHAGHFAVGYKVDDPDPEKRIRHYLVKADDTAGAKKTLPDFLSECPQFTKILQLTIDVSTG

SEQ ID NO: 2224 - protein, 115 aa, Artificial Sequence
  Description of Artificial Sequence:  Synthetic peptide
SSEEEENLDAYDWFAGNISRSQSEQLLRQKGKEGAFMVRNSSQMGMYTVSLFSKAVNDKKGTVKHYHVHTNAENKLYLAENYCFDSIPKLIHYHQHNSAGMITRLRHPVSTKANK

SEQ ID NO: 2225 - protein, 118 aa, Artificial Sequence
  Description of Artificial Sequence:  Synthetic peptide
YVAPVNSLEVEEWFFGSCTRSEAIMRLQADNLPKGTFLVRESETRPGTYALTVRETDHGHPPTIKNYRVDKTKDGSELFFINPQRKFNTVIDVVKFHTSQPGGLCSKLLKPCPKQTPN

SEQ ID NO: 2226 - protein, 110 aa, Artificial Sequence
  Description of Artificial Sequence:  Synthetic peptide
QQPARTVSLRERLLITRPVWLQLRANAAAALHVLRTEPPGTFLVRKSNTRQCQALCVRLPEASGPSFVSSHYIEESTGGVSLEGSELMFQDLVQLICGYCRTRAIHQAAT

SEQ ID NO: 2227 - protein, 113 aa, Artificial Sequence
  Description of Artificial Sequence:  Synthetic peptide
DEEDLPHHDERLWRLGNINRTQAESLLRGKRDGTFLVRDSSKAGCYACSVVVDGEVKHCVINKTSTGFGFAEPYNLYASLKELVLHYQHTSLVQHNDSLNVTLAFPVYSPQRR

SEQ ID NO: 2228 - protein, 113 aa, Artificial Sequence
  Description of Artificial Sequence:  Synthetic peptide
VPLRTCPFISVQWYAGPMERAGAESILTNRSDGTFLVRQRVKDAAEFAISIKYNVEVKHIKIMTAEGLYRITEKKAFRGLTELVEFYQQNSLKDCFKSLDTTLQFPFKEPERR

SEQ ID NO: 2229 - protein, 119 aa, Artificial Sequence
  Description of Artificial Sequence:  Synthetic peptide
SILDRLLLTGPVWFQLSINPATALHILQREPPGTFLVRKSRTSQRNVLCVRLADDSVPSFVQQFGIREEQSTLSLETSTISFPDLPRLVSFYCISRWTTHSSLPIITYSFFPLQPFTSF

SEQ ID NO: 2230 - protein, 91 aa, Artificial Sequence
  Description of Artificial Sequence:  Synthetic peptide
APSILQNGALPPWFHGFITRKQTEQLLRDKALGSFLIRLSDRAAGYILSYSPSPVLPKNKIRLFPGPRHLKCPPALQGTPQMHVGRATLGH

SEQ ID NO: 2231 - protein, 113 aa, Artificial Sequence
  Description of Artificial Sequence:  Synthetic peptide
EDDNLPHYDEKTWFVGDLNRIQAEELLSGKPDGAFLIRESSKKGCYACSVVADGDVKHCVIYSTSRGYGFAEPYNLYSTLKELVLHYQHTSLVQHNDSLNVRLAYPVYAQMPS

SEQ ID NO: 2232 - protein, 110 aa, Artificial Sequence
  Description of Artificial Sequence:  Synthetic peptide
KLIATTAHEKMPWFHGKIPRQEGERRLYSGSQPDGKFLVRERDEMGTFALSVTYGKTVYHYQILRDKSGKIAMPEGTKFDTVWQLVEYLKMKPDGLVTVLREPCVNQNNA

SEQ ID NO: 2233 - protein, 110 aa, Artificial Sequence
  Description of Artificial Sequence:  Synthetic peptide
RSCILENGVVPEWFHGIISRKAAEEMLMCKPAGYFLIRVSESRVGYTLSYRAEDRCRHFMINVLPDNQFMIVGEKTVYCSLHDLVAFHRRCPILPYNELLTVACEQGGKT

SEQ ID NO: 2234 - protein, 129 aa, Artificial Sequence
  Description of Artificial Sequence:  Synthetic peptide
TPPKFIKDTTAYWYKPEINRDQAHAMLRTRPPGSFVVRASRCYPGAFGLALKVHQVPAAVLATAKPGTDMNNELVRHFLIEPSTRGVKLKGCPNEPVFGSLSALIYQHSITPLALPCKLVIPTSNQDVP

SEQ ID NO: 2235 - protein, 124 aa, Artificial Sequence
  Description of Artificial Sequence:  Synthetic peptide
VAPPRLLEDMENQCHGPISSEFAVRKLKAAGSHPGLYVLRRSPQDFDSYLLTVCAETRSGQDYKRCLIRRDEDGSFWLAGLARRFCSLQELLGTYGCCGLQAEGAHLRLDTCCPPLPREKSNLL

SEQ ID NO: 2236 - protein, 128 aa, Artificial Sequence
  Description of Artificial Sequence:  Synthetic peptide
AKVKFVQDTSKYWYKPEISREQAIALLKDQEPGAFIIRDSHSFRGAYGLAMKVSSPPPTITQQGKKGDMTHELVRHFLIETGPRGVKLKGCPNEPNFGSLSALVYQHSVIPLALPCKLVIPSRDPTDE

SEQ ID NO: 2237 - protein, 109 aa, Artificial Sequence
  Description of Artificial Sequence:  Synthetic peptide
SQLSSSIHMTQPWFHSGLTRDETHALFAKQGMVDGMFLIRESQRIPGAFVLSFSHNQKVKHYQINMVEDGVYTIDDGGTRFTDLIQLVEFYQLNSGGLPTRLLHICTKL

SEQ ID NO: 2238 - protein, 126 aa, Artificial Sequence
  Description of Artificial Sequence:  Synthetic peptide
VNVKFVRDTSRIWYKPNISREQAISMLKDAAPGTFVVRDSNSFPGAFGLALKVATPPPGAPSSPRDPSSELVRHFLIEPTSRGVRLKGCANEPVFSSLSALVYQHSLMAMALPCPLLLPEPEAAAR

SEQ ID NO: 2239 - protein, 139 aa, Artificial Sequence
  Description of Artificial Sequence:  Synthetic peptide
IAKTFSYLRESGWYWGSITASEAKQHLQKMPEGTFLVRDSTHPSYLFTLSVKTNRGPTNVRIEYADSKFRLDSNYLSKPRILAFPDVVSLIQHYVTSCTTESKSEAPYPPPAPLPPVQKEVAVAAVHLKLLRPLGRRDS

SEQ ID NO: 2240 - protein, 139 aa, Artificial Sequence
  Description of Artificial Sequence:  Synthetic peptide
RQTYVKRVIIHPNFYNIGFAEVEKLMQTMKQGEAIIRPSSKGADHLTVTWKVTDNIYQHIDIREEGKENTFSLGRSLWIGNEEFEDLDEIIARHINPMSAYVSELIDFKYYKPNIEGIKDKAEEILKEQKKQNPGGIPY

SEQ ID NO: 2241 - protein, 113 aa, Artificial Sequence
  Description of Artificial Sequence:  Synthetic peptide
QPIERPNLAGKSWYYGAITRSQCDTVLNGHGHDGDFLIRDSETNMGDYSVSLKAPGRNKHFRVHVEQNMYCIGQRKFHSLDQLVDHYQRAPIYTNKQGEKLYLVRSLPKANGT

SEQ ID NO: 2242 - protein, 111 aa, Artificial Sequence
  Description of Artificial Sequence:  Synthetic peptide
RAKRTHRVINHPYYFPFNGRQAEDYLRSKERGEFVIRQSSRGDDHLVITWKLDKDLFQHIDIQELEKENPLALGKVLIVDNQKYNDLDQIIVEYLQNKVRLLNEMTSSEKF

SEQ ID NO: 2243 - protein, 139 aa, Artificial Sequence
  Description of Artificial Sequence:  Synthetic peptide
RQQYVKRVIVHPSFHNISYAEALKLLEGYDQGDVIVRPSSKGSDHLTATWKVTDGIYQHIDVREEGKENVFSLGQSLWIGNDEFEDLDEIIARHITPMATYVRDLLNYKYYRDTDGGSKEKAEEIIKAEKQKNPNKIHY

SEQ ID NO: 2244 - protein, 112 aa, Artificial Sequence
  Description of Artificial Sequence:  Synthetic peptide
IKKHLLSLWNDGCIVGFISKERERALLKDQQPGTFLLRFSESCREGAITFTWVERAQGGGEPYFHAVEPYTKKELSAVTFPDIIRNYKVMAAENIPENPLKFLYPNIDKDHA

SEQ ID NO: 2245 - protein, 117 aa, Artificial Sequence
  Description of Artificial Sequence:  Synthetic peptide
YIAPVKSISAEEWYFGRIGRKEAEKKLVMPGVERGMFIVRDGEATPGTFSLSVRDYDPVKGDHVKHYKIRKLDNEAGFYIAMRSPFPVLAELVKHYQQVADGLCIKLTFPCPKENPN

SEQ ID NO: 2246 - protein, 111 aa, Artificial Sequence
  Description of Artificial Sequence:  Synthetic peptide
THQRTCLLASVRWTVGNMDRTAAKNLLTPRSDGTFLVRQKEGGEFAISIKFNIDIRHIKITTSDGLFRINDKKAFRGLIELIEFYQQHSLKEYFREVDTMLCTPFKQSEES

SEQ ID NO: 2247 - protein, 111 aa, Artificial Sequence
  Description of Artificial Sequence:  Synthetic peptide
YIAPNQSVQAQDWFFGKIKRTDAEKKLLQAGNQTGTFLIRESESQPGNYSLSVREIDTVKHYRIRKVDAGGYYIAPRCMCNSLDDLVAHYCVDADGLCCKLTVICPKTDAP

SEQ ID NO: 2248 - protein, 103 aa, Artificial Sequence
  Description of Artificial Sequence:  Synthetic peptide
WYHSNITRSKAEDLLSKAARDGSFLIRDSESIQGAYALCVLYQKCVYTYRILPSEHMKLSVQASEGVPIRFFSVLPELVDAYYNPNMGLVTHLQYSVQREEEI

SEQ ID NO: 2249 - protein, 109 aa, Artificial Sequence
  Description of Artificial Sequence:  Synthetic peptide
IPKNYIEMKPHPWFFGKIPRAKAEEMLSKQRHDGAFLIRESESAPGDFSLSVNNRRTSRPSLTLIPRRMESWDSVGETLSTSWITQTPTGGKGPAMGKPACFPAITSPL

SEQ ID NO: 2250 - protein, 126 aa, Artificial Sequence
  Description of Artificial Sequence:  Synthetic peptide
EQDNQAARLYGSEYHGLMGHLEAEHLLGLTGGEGSYLVRRSPMSDGFYTLSLRFNKRTRHYKLFHKPGVGHYLREQDKRFDSVYDMVADGLINFHMQLHASPIIQQINQQTKNCYQQSPYMTLNGR

SEQ ID NO: 2251 - protein, 129 aa, Artificial Sequence
  Description of Artificial Sequence:  Synthetic peptide
VSVNFVQDTSKFWYKADISREQAIAMLKDKEPGSFIVRDSHSFRGAYGLAMKVATPPPSVLQLNKKAGDLANELVRHFLIECTPKGVRLKGCPNEPYFGSLTALVCQHSITPLALPCKLLIPDRDPLEE

SEQ ID NO: 2252 - protein, 107 aa, Artificial Sequence
  Description of Artificial Sequence:  Synthetic peptide
LINTLNSLQMSGWYHGAMTYREAKLKLKSCSNGTFLVRDSSDDRYLYTLSVKTPRGTTSVRIEYEDGLFMLDSEESLRRSVPSFDCVIKLLQYYMRMSREKNFVDAN

SEQ ID NO: 2253 - protein, 120 aa, Artificial Sequence
  Description of Artificial Sequence:  Synthetic peptide
LVPDLFQINNNPCYWGVMDRYAAEALLEGKPEGTFLLRDSAQEDYLFSVSFRRYSRSLHARIEQWNHNFSFDAHDPCVFHAPNVTGLLEHYKDPSSCMFFEPLLSSLLNRTFPFTLQHIC

SEQ ID NO: 2254 - protein, 108 aa, Artificial Sequence
  Description of Artificial Sequence:  Synthetic peptide
GVKSGTKLSLMPWFHGKITREQAELLLCPPETGLFLVRESTNYPGDYTLCVSCEGKVEHYRIIYSSGKLSIDEEEYFENLMQLVEHYTNDADGLCTNLIKPKLMEGTV

SEQ ID NO: 2255 - protein, 120 aa, Artificial Sequence
  Description of Artificial Sequence:  Synthetic peptide
ELDLSSSLREYPWFHGTLPRSDAAQLVLHSAANGHGVFLVRQSETRKGEFVLTFNFQGRAKHLRMTLNDQGHCRVQHLCFPAIYDMLEHFRQNAIPLESGGTADVTLTEFVVANHAIRSA

SEQ ID NO: 2256 - protein, 91 aa, Artificial Sequence
  Description of Artificial Sequence:  Synthetic peptide
EHVRFVKDLSAWWYKPSITRDDAINILKDRPPGTFIVRDSNSFPGAFGLALKVAQVPANTTPRKDPSVEHVRFVKDLSAWWYKPSITRDDA

SEQ ID NO: 2257 - protein, 120 aa, Artificial Sequence
  Description of Artificial Sequence:  Synthetic peptide
DLLQYGWYWGKLTRLAAQKRLAQQANGTFLVRDSQTEKYQFTVSFRSSGITLHCRIDFENNYWSFSGLATPTTYKTMVDLIQDTMKKSEYGVIGYVKQDTTLMPPFPVRLTKPINRFYEV

SEQ ID NO: 2258 - protein, 132 aa, Artificial Sequence
  Description of Artificial Sequence:  Synthetic peptide
LSEVKRLLQTCGWYHEGLSWQQSENLLKNAMIGRWLMRDSSDSRYMFAVSVQTARGPTSVRVHYFVGQFRLDAEPRLAFAIPLFDCPIKMLEYYVEYSKSVDEQRKEVWVDYSGQLYSEIYLTKPLVKEVRS

SEQ ID NO: 2259 - protein, 113 aa, Artificial Sequence
  Description of Artificial Sequence:  Synthetic peptide
ESGCEELLREESWFVGDLARGPAEELLLGKPNGAFLIRNSSSKDCYACSVVVNSQVRHCVIRHTERGYGFVEPFDLHKSLKDLVLHYSQTSLAQHNQALDVRLAYPVHMSSVP

SEQ ID NO: 2260 - protein, 118 aa, Artificial Sequence
  Description of Artificial Sequence:  Synthetic peptide
LSLDARELRSHAWYHGALPRQRAEEIVQREGDFLVRDCASQPDNYVLSCRSKAAVLHFVLNKLVLQPETVYERVQYQFEEDAFDTVPDLITFYVGSGKPISSASGALIQFPCNRTYPL

SEQ ID NO: 2261 - protein, 124 aa, Artificial Sequence
  Description of Artificial Sequence:  Synthetic peptide
ATPNDELHFSEPWFHGKLNSNSDVTPRMLAEQLLNQYQKGDGTFLARESETFKGDYSLSFWARGKVNHCRIRYKLDQSRPKYFLVEHTCFDSLYSLISHYRQCPLRSRGLELLLTEPVPQPLSH

SEQ ID NO: 2262 - protein, 112 aa, Artificial Sequence
  Description of Artificial Sequence:  Synthetic peptide
SLAEQQELKGAAWFQAGIPREISLEVLSRQSPGAFLVRQSSTKPGCFALSLRVPPPSPRVAHYLILRTQRGYKIKGFTKEFSSLKALITHHSVMPELLPVPLTLPRPAHVRS

SEQ ID NO: 2263 - protein, 115 aa, Artificial Sequence
  Description of Artificial Sequence:  Synthetic peptide
PPPERQSYIDKPWFHNVTREQATTLIKEQSTYGNSQDGYFLLRPSTTNVNNPLALVLWYRDRVYNVPVRKRPDNRYALGSAKVNEQSFSNVEEIVMFYTREELVLHSGGVEMGST

SEQ ID NO: 2264 - protein, 140 aa, Artificial Sequence
  Description of Artificial Sequence:  Synthetic peptide
RAGKVQRIVNHPNWHVLNSGQAEQFLASQHRGDCVIRPSSKGPDRIAVTWKVDEDVYQHIDVQEIDKPNEYSLGRILMVSGQYRYSDLDDLIINHVKATARKFDEIQMHEKYKPEHELDAFLKNYVQAHPGRSIYGFSVD

SEQ ID NO: 2265 - protein, 113 aa, Artificial Sequence
  Description of Artificial Sequence:  Synthetic peptide
DEEELPHHEERTWYVGKINRLQAEEMLCGKRDGTFLIRESSQKGCYACSVVVDGDTKHCVIYKTATGYGFAEPYNLYASLKDLVLHYKHTSLVQHNDSLNVTLAHPVLSQPPA

SEQ ID NO: 2266 - protein, 117 aa, Artificial Sequence
  Description of Artificial Sequence:  Synthetic peptide
TEKTLDNLDQYEWYSRNMNRSKAEQLLKSEDKEGGFIVRNSSQAGLYTVSLYTKYGGEGSTCIRHYHIKETPYPKKYYLAEKHVFNTIPEMIEYHKHNAAGLVTRLRYPVCSKNKSA

SEQ ID NO: 2267 - protein, 117 aa, Artificial Sequence
  Description of Artificial Sequence:  Synthetic peptide
TGKKSNNLDQYEWYSRNLNRSKAEQLLRNEDKEGGFVVRDSSQPGLYTVSLYTKFGGEGSSGIRHYHIKETVTSPKQYYLAEKHLFNSIPEIIEYHKHNAAGLVTRLRYPVTPKKTA

SEQ ID NO: 2268 - protein, 128 aa, Artificial Sequence
  Description of Artificial Sequence:  Synthetic peptide
GQEVERPLEQQTWYHGAIPRLEVQQLLTKDGDFLVRKSQEKPGYVLSVHWSGACKHFLVQNKDNMYCLDGESFHTIPQLIQQYQTSQQHVTKKSEVVLRRPVLKDKWVLEHDDIILGHIIGRGNFGEV

SEQ ID NO: 2269 - protein, 112 aa, Artificial Sequence
  Description of Artificial Sequence:  Synthetic peptide
SVLNLPHRNESYWFLKDATRRDAEELLRGSPSGTFLIRARNAGHYALSIVCKGNVQHCIIYETESGFGFAAPYNIYPTLKKLVEHYATNSLEEHNDTLTTTLRLPVYYWEQN

SEQ ID NO: 2270 - protein, 121 aa, Artificial Sequence
  Description of Artificial Sequence:  Synthetic peptide
RLLDPRDLRSHAWYHGSTLRGGRKGAEAEVPNDGDFLVRDCASQPGNYVLTVRWKGQPLHFVINRVVIQPETVYERAQYQFEDEAFDTVADLITFYVGSGRPISQASGARIITPKPRSVPL

SEQ ID NO: 2271 - protein, 118 aa, Artificial Sequence
  Description of Artificial Sequence:  Synthetic peptide
LKLNSSDPRSHAWYHGRIPREVSESLVQRNGDFLIRDSLTSLGDYVLTCRWKNESLHFKINKVMVKTSDSYTRIQYLFEQESFDNIPALVRYYVGSRRPVSEQSSAMIYCPINRTYPL

SEQ ID NO: 2272 - protein, 103 aa, Artificial Sequence
  Description of Artificial Sequence:  Synthetic peptide
IKQKLLKYWDEGWCIGFISKHDASQSMCMLPNTSFLLRFSDTQTGAVSIGFVCQDDDGQKVPFHLSPLTIKDLDQLSLASRIASCPQLKDIRYMYPNIDKEEM

SEQ ID NO: 2273 - protein, 102 aa, Artificial Sequence
  Description of Artificial Sequence:  Synthetic peptide
RVDPSVPLERQVWYHGTLSRSEAEGLLTLCKESSYLVRNSQTGRNDYSLSLRSCKGFMHMKFSLSADGRYVLGENSPPFGTIPEVIHYYTTHKLPIRGAEHM

SEQ ID NO: 2274 - protein, 117 aa, Artificial Sequence
  Description of Artificial Sequence:  Synthetic peptide
TLKLSYTIIREGYYHGLLPREDAAALLTQNGDFLIRISEPTDGAEQNFILSCMTDDKSKSNDENPGMQNFVVGFQNGRYLVAENHSFPTIEKLVEFHKKNRIQNIFLNRPIMRQSWE

SEQ ID NO: 2275 - protein, 123 aa, Artificial Sequence
  Description of Artificial Sequence:  Synthetic peptide
FLVLEKTLRELKFYHGFLPREDLQTTLHNPGDYLIRVSEVVEGENKLVREIILSLMTVHMEGKQKKKRIHNVVIKRVSNKFLCEAARPFASVTDLITYYSKHTGHCSSGNFQLKHPILQQSWE

SEQ ID NO: 2276 - protein, 124 aa, Artificial Sequence
  Description of Artificial Sequence:  Synthetic peptide
VAPPMVLENIQSNCHGPISMDFAISKLKKAGNQTGLFVLRCSPKDFNKYFLTFAVERENVTEYKHCLITKNENGEYNLSGTRKNFSNLKDLLNCYQMETVRSDSIIFQFTKCCPPKPKDKSNLL

SEQ ID NO: 2277 - protein, 114 aa, Artificial Sequence
  Description of Artificial Sequence:  Synthetic peptide
VFKSMIETIQSDWFFNTFTKDQSQAQLEGRVDGTFLIRISTTDPKYPFTLTKRTNGKTTHSRIERVSPSKDKIKFILSSKTKVYEANSLKELVDMMRKNKLVKEACPREEKLSE

SEQ ID NO: 2278 - protein, 110 aa, Artificial Sequence
  Description of Artificial Sequence:  Synthetic peptide
IAPTEEQLRREPWYHGKMSRRDAEKLLQMDGDFLVRDSITNPGQYVLTGMHSGQPKHLLLVDPEGVVRTKDVLFESISHLISHHRQNEQPIVAAESGSTLPAPHPQFCRV

SEQ ID NO: 2279 - protein, 144 aa, Artificial Sequence
  Description of Artificial Sequence:  Synthetic peptide
VQKTDHFLFSYPWFHGPISRVKAAHLVQSSGPEGHGVFLVRQSETRRGDYVLTFNYQGKAKVPPRTSRTSRTISSDAPPCVCVCVCVCPQHLRLSLTEWGQCRVQHLRFPSVMDMLSHFRLYPIPLECGAAGCNRCPASWWRAP

SEQ ID NO: 2280 - protein, 112 aa, Artificial Sequence
  Description of Artificial Sequence:  Synthetic peptide
ITLVYENVKNQPWYHGHISRDIAQSLIRQPGDFLVRCSDHTTGKFVLSGMTEHGDHKHLILLDEKNQVRTPEKTFPTITELVRSHMENGQPVRSDGPQNQTALMLENAIPRG

SEQ ID NO: 2281 - protein, 138 aa, Artificial Sequence
  Description of Artificial Sequence:  Synthetic peptide
LKLNSSDPRSHAWYHGRIPREVSESLVQRNGDFLIRDSLTSLGDYVLTCRWKNESLHFKINKVMVKTSDSYTRIQYLFEQESFDNIPALVRYYVGSRRPVSEQSSAMIYCPINRTYPLRYLEASYGLSPGRHGGSHSP

SEQ ID NO: 2282 - protein, 102 aa, Artificial Sequence
  Description of Artificial Sequence:  Synthetic peptide
IVDPTLPLEKQSWYHGSVSRQEAEAQLQQCREASFLVRDSESATSKYSIALKTSQGCVHIIVAQTKECGYTLEKSSCVFPSIPEVVHHYCTQRLPFTGAEHM

SEQ ID NO: 2283 - protein, 129 aa, Artificial Sequence
  Description of Artificial Sequence:  Synthetic peptide
KRSDRKDVQHNEWYIGEYSRQAVEEAFMKENKDGSFLVRDCSTKSKEEPYVLAVFYENKVYNVKIRFLERNQQFALGTGLRGDEKFDSVEDIIEHYKNFPIILIDGKDKTGVHRKQCHLTQPLPLTRHL

SEQ ID NO: 2284 - protein, 111 aa, Artificial Sequence
  Description of Artificial Sequence:  Synthetic peptide
RAKRTHRVINHPYYFPFNGKQAEDYLRSKERGEFIIRQSSRGDDHLAITWKLDKDLFQHVDILELDKENPLALGKTLIVDNTKYNDLDHVIVEYLQNKIKLLNEITSNEKF

SEQ ID NO: 2285 - protein, 123 aa, Artificial Sequence
  Description of Artificial Sequence:  Synthetic peptide
YPLNCSDPTSERWYHGHMSGGQAETLLQAKGEPWTFLVRESLSQPGDFVLSVLSDQPKAGPGSPLRVTHIKVMSPQGGRYTVGGSETFDSLTDLVEHFKRTGIEEASGAFVYLRQPYYATRVN

SEQ ID NO: 2286 - protein, 113 aa, Artificial Sequence
  Description of Artificial Sequence:  Synthetic peptide
EDENLPHYDEKSWFVGDLNRTQSEDLLHGKPDGAFLIRESSKKGCYACSVVVEGEVKHCVIYSTPRGFGFAEPYNLYSTLKDLVLHYHQTSLVQHNDSLNVRLAYPVYAQMPS

SEQ ID NO: 2287 - protein, 104 aa, Artificial Sequence
  Description of Artificial Sequence:  Synthetic peptide
EEENLPHHDEKTWFVGDLNRIQAEDLLCGKPDGAFLIRESSKKGCYACSVVADGEVKHCVIYSTPRGYGFAEPYNLYSTLKDLVLHYQQTSLVQHNDSLNDRKQ

SEQ ID NO: 2288 - protein, 114 aa, Artificial Sequence
  Description of Artificial Sequence:  Synthetic peptide
EDESSPHHDESTWYVGDIKRSQAEEMLRGTCDGTFLIRESQTQKGSYACSVVVDGDTKHCVVYKTVTGYGFAEPYNLYSSLKDLVLHYKNVSLVQHNDHLNVTLAHPVLARSQN

SEQ ID NO: 2289 - protein, 122 aa, Artificial Sequence
  Description of Artificial Sequence:  Synthetic peptide
YKRHISTLWQNGFIFMFLKRDVVTQILKNQDVGTFVILFSEAFPGQLEISYVGTDQKDSLSKSSNDLQSPTTTTTTTTSTRVKHYLVQANDTSGSKRTLPDFLSECNQFTHILQLNIAMIPQ

SEQ ID NO: 2290 - protein, 119 aa, Artificial Sequence
  Description of Artificial Sequence:  Synthetic peptide
LRSDKSDIRSYAWFHGRMPRDIAEDLIRREGDFLIRESVNNAGEFVLTCKYKSATYHFKINKKTMPKVSSVFDSAILVWRMTISIPFPLSVYYHVGKKIPVSKKSGVILSQPVNRDIPI

SEQ ID NO: 2291 - protein, 102 aa, Artificial Sequence
  Description of Artificial Sequence:  Synthetic peptide
RVDPMLPLEKQVWYHGALTRSEAESLLTLCKECSYLVRKSQTSRNDYSLSLRSCHGFMHMKFSQSRDGKFILGENSPPFDSIPEVIHFYTTNKLPIRGAEHL

SEQ ID NO: 2292 - protein, 121 aa, Artificial Sequence
  Description of Artificial Sequence:  Synthetic peptide
VAPPAVLENIHSNCHGPISMDFAISKLKKAGNQTGLYVLRCSPKDFNKYFLTFAVERENVIEYKHCLITKNENGEYNLSGTKRNFSSLKDLLNCYQMETVRSDSIIFQFTKCCPPKPKDKS

SEQ ID NO: 2293 - protein, 105 aa, Artificial Sequence
  Description of Artificial Sequence:  Synthetic peptide
MDAVTVYHGKISRETGEKLLLATGLDGSYLLRDSESVPGVYCLYQGYIYTYRVSQTETGSWSAETAPGVHKRFFRKVKNLISAFQKPDQGIVTPLQYPVEKSSGR

SEQ ID NO: 2294 - protein, 108 aa, Artificial Sequence
  Description of Artificial Sequence:  Synthetic peptide
GVKSGGKLSLMPWFHGKITRNQAEQLLCPPETGLFLVRESTNFPGDYTLCVSCDGKVEHYRIIYHNGKLTIDEEEYFENLMQLVEHYTKDADGLCTRLLKPKVEEGTV

SEQ ID NO: 2295 - protein, 109 aa, Artificial Sequence
  Description of Artificial Sequence:  Synthetic peptide
YVTPVNSLEKHSWYHGRICRNAAEYLLSSGINGSFLVRESESSPGQRSISLRYEGRVYHYRINEDSEGKMFVTTESKFNTLAELVHHHSMLADGLITQLLYPAPKHNKP

SEQ ID NO: 2296 - protein, 113 aa, Artificial Sequence
  Description of Artificial Sequence:  Synthetic peptide
DEDALPHHEERTWYVGKINRTQAEEMLSGKRDGTFLIRESSQRGCYACSVVVDGDTKHCVIYRTATGFGFAEPYNLYGSLKELVLHYQHASLVQHNDALTVTLAHPVRAPGPG

SEQ ID NO: 2297 - protein, 111 aa, Artificial Sequence
  Description of Artificial Sequence:  Synthetic peptide
YVTPLNSLEKHSWYHGPISRNAAEYLLSSGINGSFLVRESESSPGQRSISLRYDGRVYHYRISEDSDGKVYVTADAKFNTLAELVHHHSALHEGHGLITPLLYPAPKQNKP

SEQ ID NO: 2298 - protein, 114 aa, Artificial Sequence
  Description of Artificial Sequence:  Synthetic peptide
DDDDQAHHDECSWYVGDIKRSYAEDLLRGKRDGTFLIRESQTQKGSFACSVVVEGEIKHCVVYKTATGFGFAEPYNLYGSLKDLVLHYKHTSLVQHNDSLNVTLAYPVLAQQPR

SEQ ID NO: 2299 - protein, 114 aa, Artificial Sequence; identical to SEQ ID NO: 2288
  Description of Artificial Sequence:  Synthetic peptide

SEQ ID NO: 2300 - protein, 110 aa, Artificial Sequence
  Description of Artificial Sequence:  Synthetic peptide
MDTFDVSDKSSWYFGPMSRQDATEVLMNERERGVFLVRDSNSIAGDYVLCVREDTKVSNYIINKVQQQDQIVYRIGDQSFDNLPKLLTFYTLHYLDTTPLRRPAQKKVEK

SEQ ID NO: 2301 - protein, 111 aa, Artificial Sequence
  Description of Artificial Sequence:  Synthetic peptide
YVAEYKSLDAEEWFLGKIKRVEAEKMLNQSFNQVGSFLIRDSETTPGDFSLSVKDQDRVRHYRVRRLEDGSLFVTRRSTFQILHELVDHYKIETDGLCCKLLYPCLQAEKP

SEQ ID NO: 2302 - protein, 109 aa, Artificial Sequence
  Description of Artificial Sequence:  Synthetic peptide
IPSVHVAKVSRGWLYEGLSREKAEELLLLPGNPGGAFLIRESQTRREFLSFQLSGLTTNVVDIILAHHFGQEELQANLDLIQTYRMHIAQDINQDNLQLFLNSYNGRRD

SEQ ID NO: 2303 - protein, 103 aa, Artificial Sequence
  Description of Artificial Sequence:  Synthetic peptide
IKQKLLKFWDEGWCIGFISKNDASQSMMMCQHSSFLLRFSDSQTGAVSIGFVCEEADGQKIPFHLAPFTIKDLDQLSLASRIASCPQLKDIRYMYPAIDKEEM

SEQ ID NO: 2304 - protein, 118 aa, Artificial Sequence
  Description of Artificial Sequence:  Synthetic peptide
LKLSSEDLSSHAWYHGPLRREAAEALLERNGDFLVRDSSSTPRDYVLTCFWMNMPMHFKIIRVVLRPKKGYSRELFQFEEDRFDNIPALIRLYVGGRRPISQASGAVISHPITRTLPL

SEQ ID NO: 2305 - protein, 114 aa, Artificial Sequence
  Description of Artificial Sequence:  Synthetic peptide
FLARRQTVKEQPWYFGTLNRFETEILLLAPENDVGAFLVRHSEKDNIGYVLSVLSGDRSREVKHIKIHQNQNESFYLDKSQTFQSLEKLVDYYWKYSLDGDSFLKQPCRRPEPK

SEQ ID NO: 2306 - protein, 124 aa, Artificial Sequence
  Description of Artificial Sequence:  Synthetic peptide
LKLSAADIRSHGWYHGHIPREVSETLVLRNGDFLVRDSLTSVGDFVLTCRWDNEALHFRISKVLVKSSETKARIPGYSRVQYVLEADTFDSVQELVRFYVGQRKAVSQSNGVHIYCPVSRTLPL

SEQ ID NO: 2307 - protein, 111 aa, Artificial Sequence
  Description of Artificial Sequence:  Synthetic peptide
MSRDDHMKWFHANLSREAADDLLRQGKYEDGTFLVRESSTAAGDFVLSILCQEEVCHYQVRRHGEDAFFSIDDEMQTKILHGLETLVDYYQQGANGLPTKLTVPLIRDPPP

SEQ ID NO: 2308 - protein, 118 aa, Artificial Sequence
  Description of Artificial Sequence:  Synthetic peptide
ITTTFQYLETSGWYWGPTSVSEAQEALMKKPEGTFLMRDSSHPKHMLTLSVQTCCGPTSVRVDYSRGSFWLDSIAAGQPCTQTFPDVLSLVQFYASSGPVPQSQTPSAAHPKVKPEPA

SEQ ID NO: 2309 - protein, 112 aa, Artificial Sequence
  Description of Artificial Sequence:  Synthetic peptide
KVDPGLALEKQPWYHGSISRAEAESRLQPCKEAAYLVRNSESGNSKYSIALKTSQGCVHIIVAQTKDNKYTLNQTSAVFDSIPEVVHYYSNAKLPFKGAEHMTLLHPVHKLH

SEQ ID NO: 2310 - protein, 126 aa, Artificial Sequence
  Description of Artificial Sequence:  Synthetic peptide
PTMKFVMDTSKYWFKPSITREQAINLLRTEKPGAFVIRDSSSYRGSFGLALKVQETSASAPNRPGEDSSDLIRHFLIESSAKGVHLKGADEEPYFGSLSSFVCQHSIMALALPCKLTIPQKELGGA

SEQ ID NO: 2311 - protein, 131 aa, Artificial Sequence
  Description of Artificial Sequence:  Synthetic peptide
VLTAVRKLQESGFYWSTLTGSQANLLLSTEPAGTFLIRDSSDRRHFFTLSVKTESGTKNLRIQCEPCGFSLQTDPRSAQTVPRFDCVLKLLCHYMPTKDSGNGSKRAYYIYSGGERVPLLLSRPLSTNVSS

SEQ ID NO: 2312 - protein, 111 aa, Artificial Sequence
  Description of Artificial Sequence:  Synthetic peptide
KEKILEEDINLPYYHGALMNQDADQLLVNDGDYMIVVKMNQELNKMQLYLAVRLKKGIRRFEIKRNPTSAKIGGKSAPNIGKLVDSMQKETMEIKGERVILKRAIPKGKFQ

SEQ ID NO: 2313 - protein, 115 aa, Artificial Sequence
  Description of Artificial Sequence:  Synthetic peptide
TENKPTNLEIYEWYHRNITRNQAERLLRQESKEGAFIVRDSRHLGSYTISVFIRDKRDMEATIKHYQIKRNDSGQWYVAERHLFQSIPELIWYHQHNAAGLMSRLRYPVGLMGSC

SEQ ID NO: 2314 - protein, 98 aa, Artificial Sequence
  Description of Artificial Sequence:  Synthetic peptide
WYHGKLDRMIAEERLLQVRAAGSYLIRESDRRPGSFVLSFLSMTNTVSHFRIIAMCGDYYIGGRRFSSLSDLIGYYSYVSCLLKGEKLISPVAPPEPV

SEQ ID NO: 2315 - protein, 117 aa, Artificial Sequence
  Description of Artificial Sequence:  Synthetic peptide
VVNAVRKLQESGFYWSAVTGGEANLLLSAEPAGTFLIRDSSDQRHFFTLSVKTQSGTKNLRIQCEGGSFSLQSDPRSTQPVPRFDCVLKLVHHYMPPPGTPSFSLPPTEPSSEVPEQ

SEQ ID NO: 2316 - protein, 131 aa, Artificial Sequence
  Description of Artificial Sequence:  Synthetic peptide
VVNAVCKLQESGFYWSAVTGGEANLLLSAEPAGTFLIRDSSDQRHFFTLSVKTQSGTKNLRIQCEGGSFSLQSDPRSTQPVPRFDCVLKLVHHYMPPPGAPSFPAPPTEPSSEVSEQPPSQPLPGNPPRRA

SEQ ID NO: 2317 - protein, 114 aa, Artificial Sequence
  Description of Artificial Sequence:  Synthetic peptide
RVDTALALEKQPWFHGPLSRAEAENLLSLCKEGSYLVRLSETRAQDCILSLRSNQGSMHLKFARTRENQVVLGQHSGPFPSIPELVLHYSARPLPVQGAEHLALLYPVTSSQSS

SEQ ID NO: 2318 - protein, 120 aa, Artificial Sequence
  Description of Artificial Sequence:  Synthetic peptide
LVPDLQAITALPCYWGVMDRYQAEALLDGRPEGTFLLRDSAQEDYLFSVSFRRYNRSLHARIEQWNHNFSFDAHDPCVFHSSTVTGLLEHYKDPSACMFFEPLLTAPLHRTFPFSLQHLA

SEQ ID NO: 2319 - protein, 112 aa, Artificial Sequence
  Description of Artificial Sequence:  Synthetic peptide
MSRDSDPMKWYHGNLSREAADELLKQGYEDGTFLVRESSTAAGDFVLSLLCQGEVCHYQVRRHGGEDAFFSIDDKVQTKILHGLDTLVDYYQQAANGLPTKLTVPLIRDLPP

SEQ ID NO: 2320 - protein, 108 aa, Artificial Sequence
  Description of Artificial Sequence:  Synthetic peptide
GPSASGRFAGNQWYYGKVTRHQAEMALNERGNEGDFLIRDSESSPNDFSVSLKAQGKNKHFKVCMKDCMYCIGQRKFSTMEELVEHYKKAPIFTSEQGEKLYLIKPLS

SEQ ID NO: 2321 - protein, 108 aa, Artificial Sequence
  Description of Artificial Sequence:  Synthetic peptide
MPDAAGHLPFYYGSISRADAEEYLKLGGMMDGLFLLRQCLRTLGGYVLSMVYNLHFHHYPVERQLNGTYAIAGGKAHCGPAELCEYYSKDADGLCCTLRRPCNRPAGV

SEQ ID NO: 2322 - protein, 114 aa, Artificial Sequence; identical to SEQ ID NO: 2121
  Description of Artificial Sequence:  Synthetic peptide

SEQ ID NO: 2323 - protein, 117 aa, Artificial Sequence
  Description of Artificial Sequence:  Synthetic peptide
PRSTLTAMATAVWYHRDISRVQAEELLARAGKDGSYLVRDSESVPGAYALCLLFQRHVHTYRILPDADGLLAVQTTQGVQVNCFRTLEDLVFGYQQPHKGLVSPLLYGVPRDMDIGD

SEQ ID NO: 2324 - protein, 119 aa, Artificial Sequence
  Description of Artificial Sequence:  Synthetic peptide
KKEKQRGYRKQNWFWGYVSQTEAEEYLQDAVEGEFIVRCMLYQEATKTILTVVYFVDKTRKFEHFSTNFRRNKWILESFPSAHRTLMDLVAHYHQNFIGMTQLKLKVPRKHPDWFIKRH

SEQ ID NO: 2325 - protein, 114 aa, Artificial Sequence
  Description of Artificial Sequence:  Synthetic peptide
SMSSIAIHMAQPWFHSKLSREEAQKLITQQGRVDGVFLVRDSQSNPRTFVLSLCHTQKIKHFQIVPVEENSELFYSLDDGHTRFSDLLQLVEFYQLNRGILPCKLKHHCARISL

SEQ ID NO: 2326 - protein, 111 aa, Artificial Sequence
  Description of Artificial Sequence:  Synthetic peptide
IKRHLLSLWDDGCIMGFVTKDRTKSLLNNKAPGTFLLRFSESNRDGAITFSWVEHDANEDPQIRSVEPYTKKELSAVSLPDIIRNYRVMAADNVPENPLRFLYPQIPKDDA

SEQ ID NO: 2327 - protein, 107 aa, Artificial Sequence
  Description of Artificial Sequence:  Synthetic peptide
GPKMEQFLSSCPWFHGPISRVKAAQLVQLGGLEGHGVFLVRQSETRRGEYVLTFNFQGRAKHLRLSLTERGQCRVQHLRFSSITEMLHHFHRYPIPLECGATCDVRL

SEQ ID NO: 2328 - protein, 120 aa, Artificial Sequence
  Description of Artificial Sequence:  Synthetic peptide
YPLNCSDPTTERWYHGHLSGPNAEKLLVARDEPFTFLVRESLSKPGDFVLSVLTDTITSAGTKRVSHIKILCQNDRYTVGGAEMFDTLTDLVEYYKRKGIEEISGNWVYFKQPYYSTRVN

SEQ ID NO: 2329 - protein, 109 aa, Artificial Sequence
  Description of Artificial Sequence:  Synthetic peptide
ASKGAVQLKTMPWFHGRISREDAEKLLTPPKNGRFLVRESQNYPGDYTLCVSYDGRVENYRVRRNEKGLVTVDDDEYFDNLIKLVEHYQKEADGLCTRLKAPVDKEGQH

SEQ ID NO: 2330 - protein, 126 aa, Artificial Sequence
  Description of Artificial Sequence:  Synthetic peptide
PTMKFVMDTSKYWFKPNITREQAIELLRKEEPGAFVIRDSSSYRGSFGLALKVQEVPASAQNRPGEDSNDLIRHFLIESSAKGVHLKGADEEPYFGSLSAFVCQHSIMALALPCKLTIPQRELGGA

SEQ ID NO: 2331 - protein, 125 aa, Artificial Sequence
  Description of Artificial Sequence:  Synthetic peptide
FPALELALRHFEFYHGFLPREDLQSTLQNPGDFLLRVSEVVEGENKVNREIILSLIPIQEEGKEDEDKIRTRNVVIKRAGYLFFCETTRSFDSIFELINYYMKNTGSCSSATFQLLNPILQQPWE

SEQ ID NO: 2332 - protein, 125 aa, Artificial Sequence
  Description of Artificial Sequence:  Synthetic peptide
VAPPLIVHNIQNGCHGPICTEYAINKLRQEGSEEGMYVLRWSCTDFDNILMTVTCFEKSEVSQEKSCMVPQVQKGRYSLHGSDRSFPSLGDLMSHLKKQILRTDNISFVLKRCCQPKPREISNLL

SEQ ID NO: 2333 - protein, 124 aa, Artificial Sequence
  Description of Artificial Sequence:  Synthetic peptide
VAPPTVLENIQSNCHGPISMDFAISKLKKAGNQTGLYVLRCSPKDFNKYFLTFAVERENVIEYKHCLITKNENEEYNLSGTKKNFSSLKDLLNCYQMETVRSDNIIFQFTKCCPPKPKDKSNLL

SEQ ID NO: 2334 - protein, 137 aa, Artificial Sequence
  Description of Artificial Sequence:  Synthetic peptide
KFWAKEYLKYAEWWQESFSREDANQVLSTMGKGTFLIRASTSKKNCLVISYNVHAQTPNHMLLSYLGLYTGVSLYDEIGRVYPTLASLIRGKKSWLKRPFQSFSYLNKSNLKLKYINDKINEIVQQQPQNQQKQQQH

SEQ ID NO: 2335 - protein, 129 aa, Artificial Sequence [sequence omitted]

SEQ ID NO: 2336 - protein, 110 aa, Artificial Sequence
  Description of Artificial Sequence:  Synthetic peptide
QADLLAQSGIPEWFHGTISREAAENMLESQPLGTFLIRVSHSHVGYTLSYKAQTCCRHFMVKLSEDGTCTFAGDHMTHASLHALVTFHQQKPIRPFGELLTQACGQEDPA

SEQ ID NO: 2337 - protein, 113 aa, Artificial Sequence
  Description of Artificial Sequence:  Synthetic peptide
SLRERLLLTRPVWLQLRASAAAALHVLRTEPPGMFLVRKSNTRGCQALCVRLPEASGPSFVSSHYIQESPGGVSLEGSELMFPDLVQLICAYCHTRDILLLPLQLPRAICQAA

SEQ ID NO: 2338 - protein, 113 aa, Artificial Sequence
  Description of Artificial Sequence:  Synthetic peptide
SVLDRLLLTHPVWLQLSINSATALHILRREPPGTFLVRRSSTSQKKMLCVRLADDSMPSFLKQVFIREEDSAFSLESSAISFPDLCRLIAFYCVSRDVLPFTLELPEAIAKAS

SEQ ID NO: 2339 - protein, 123 aa, Artificial Sequence
  Description of Artificial Sequence:  Synthetic peptide
FPVLEKTLRGFKFYHGFLPREDLQATLHNPGDYLIRVSEVVEGESKVVREIILSLMTGHMEGKQKEKRIHNVVIKRVSNKFFCEAARPFATVADLINYYTKHTGHCSSGNFQLKHPILQQTWE

SEQ ID NO: 2340 - protein, 122 aa, Artificial Sequence
  Description of Artificial Sequence:  Synthetic peptide
KSHVVFAEVREPWFAGNISSITAEQRVMQPGLPIGTFLIRENIKTGTFVLTVRSSNHDSPRAYVIHRRPNNDGFDIRDRHDQVVITFGSLLQLVNHFSCEKVPGEVQICTRLTKAAPPLTET

SEQ ID NO: 2341 - protein, 117 aa, Artificial Sequence
  Description of Artificial Sequence:  Synthetic peptide
HLAAVTSLESNEWYFGELKRIEAEHYLQLPGNDHGSFLVRISESQSSEYSLSVREENTVKHYRIRSRYSRTDPTLKRFYISRQLPFVNIQQLVNHYLENQSGLCCRLGKPCIRPTHP

SEQ ID NO: 2342 - protein, 105 aa, Artificial Sequence
  Description of Artificial Sequence:  Synthetic peptide
VMEVLKKHLKPHWNDGAILGFVNKQQAHDLLISKPDGTFLLRFSDSEIGGITIAWKFDSAERMFWNLMPFTTRDFSIRSLADRLGDLSYLIYVFPDRPKDEVFSK

SEQ ID NO: 2343 - protein, 108 aa, Artificial Sequence
  Description of Artificial Sequence:  Synthetic peptide
MASRRWFHPNISGLEAERLLMERGYDSSFLARPSSSNPGDFTLSVRRNGEVTHIKIQNTGDFYDLYGGEKFATLSELVQFYMENGGQLREKNGEIIELKYPLNCADPT

SEQ ID NO: 2344 - protein, 124 aa, Artificial Sequence
  Description of Artificial Sequence:  Synthetic peptide
MAANFDAEDRDSWFWGRIKRHEAVSLLQGQRHGVFLVRDSISISGGFVLSVSENSKVSHYIINSESRASASGDDFVFASPGLAPPYFRIGDQEFETLPALLEFYKIHYLDTTTLIEPVSKARHS

SEQ ID NO: 2345 - protein, 108 aa, Artificial Sequence
  Description of Artificial Sequence:  Synthetic peptide
RAEVNAKLNAMPWFHGRIKREEAESLLKPREDGLFLVRESTNFPGDYTLCVCFNEKVEHYRIKYVDNKLTIDDDEYFDHLGQLVEHYTLDSDGLCTKLMKALPKEEFC

SEQ ID NO: 2346 - protein, 108 aa, Artificial Sequence
  Description of Artificial Sequence:  Synthetic peptide
TKKCLKDYWSDRLIIGFISKQYVHTLLSTQPDGTFLLRFSDSEIGGITIAHILKREDNSAQIQNIQPFTAKDLNILSLGDRVRDLKQLKYLYSNKCKDDVFGRHYSKK

SEQ ID NO: 2347 - protein, 115 aa, Artificial Sequence
  Description of Artificial Sequence:  Synthetic peptide
SSEEEENLDDYDWFAGNISRSQSEQLLRQKGKEGAFMVRNSSQVGMYTVSLFSKAVKKLSHPKLVKFYGVCSKEYPIYIVTEYISNGCLLNYLRSHGKGLEPSQLLEMCYDVCEG

SEQ ID NO: 2348 - protein, 107 aa, Artificial Sequence
  Description of Artificial Sequence:  Synthetic peptide
MTDLSKELWYHGRISRLDAEQLLDNFGRLSGSFLVRDSLTTTGEYVLSLSFQGKKYHYIISRHPDGSVAIQDGAKFDSPIELIQYHTKKVDGLITTLKQPCCRLPGQ

SEQ ID NO: 2349 - protein, 113 aa, Artificial Sequence
  Description of Artificial Sequence:  Synthetic peptide
KVDPGLPLEKQPWYHGAISRAEAESRLQPCKEAGYLVRNSESGNSRYSIALKTSQGCVHIIVAQTKDNKYTLNQTSAVFDSIPEVVHYYSNEKLPFKGAEHMTLLYPVHSKLH

SEQ ID NO: 2350 - protein, 113 aa, Artificial Sequence
  Description of Artificial Sequence:  Synthetic peptide
VGREEDPHEGKAWFHGKISKQEAYNLLMTVGQVGSFLVRPSDSTPGDYSLYFRTTETIQRFKISPTPSNQFMMGGRYYNSIDDIIEHYRREQIVEGHSLKDALSVQHQEQVLT

SEQ ID NO: 2351 - protein, 122 aa, Artificial Sequence
  Description of Artificial Sequence:  Synthetic peptide
KSHVVYAEYREPWFAGNISSILAEQRVMQPQLPIGSFLIRENSKTDTFVLVVRSSHNESPQAYIIYRRPNQEGFEIRDNHRPAVIHFGSLHQLVNHYSCEKVPGEIQICTKLTKAAPPLPEQ

SEQ ID NO: 2352 - protein, 120 aa, Artificial Sequence
  Description of Artificial Sequence:  Synthetic peptide
VAPSSVVQNLENGCHGPICTEYAIHKLRQEGNEEGTYVLRWSCTEYNFIIMTVVCIELDLCESRPVPQYKNFQIETSPQGYRLYGTDTFRPTLKELLEHLQGQLLRTDNLRFQLRRCCPP

SEQ ID NO: 2353 - protein, 118 aa, Artificial Sequence
  Description of Artificial Sequence:  Synthetic peptide
VMEVLKKHLKPHWNDGAILGFVNKQQAHDLLINKPDGTFLLRFSDSEIGGITIAWKFDSQERMFWNLMPFTTRDFSIRSLADRLGDLNYLIYVFPDRPKDEVYSKYYTPVPCESATAK

SEQ ID NO: 2354 - protein, 107 aa, Artificial Sequence
  Description of Artificial Sequence:  Synthetic peptide
DTDLTAMMHEYPWFHGTLPRFDAAQLVLREGTSSHGVFLVRQSETRKGEFVLTFNFQGKAKHLRMTLNDLGQCRVQHLWFPSITEMLEHFRQHPIPLESGGTADVTL

SEQ ID NO: 2355 - protein, 104 aa, Artificial Sequence
  Description of Artificial Sequence:  Synthetic peptide
AMKVTREHLRGPWNDGSIVGFIHKSKAEDYLLKCPRGTFLLRFSDSELGGITIAWVNESNDGQPQILHIQPFTAKDFATRSLSDRIRDFEDLFYLYPNKPKNEA

SEQ ID NO: 2356 - protein, 115 aa, Artificial Sequence
  Description of Artificial Sequence:  Synthetic peptide
EKEVQYHNNESLWLLPDTNRAKAEQLLYGKAKGTFLIRRTREQIDWACSIVAKDQGEVCHCKINYTSTGYGFAEPYNLYGSLLELVLAYQQINLAQHNEELDTMLEYPVYGPQPR

SEQ ID NO: 2357 - protein, 100 aa, Artificial Sequence
  Description of Artificial Sequence:  Synthetic peptide
IRDHLQVLWVDNTIIGFIHKSTAEKYLAKCVPGTFLLRFTDSVLGGISIAWVHESNDGQRQVLHIQPFTAKDLVVRSLANRICDLGELTYLYPTIPKQEA

SEQ ID NO: 2358 - protein, 100 aa, Artificial Sequence
  Description of Artificial Sequence:  Synthetic peptide
TKRCLRDYWTDGLIFGFIGKQYIHCMLQDKTNGFFLLRFSDSEIGGITIAYVEPTENGGRRVQNIQPFTKKDLDSAGLGDRIRDISCISHVYPGIPKNEA

SEQ ID NO: 2359 - protein, 110 aa, Artificial Sequence
  Description of Artificial Sequence:  Synthetic peptide
AHWLLQHGAAPAWFHGFITRREAERLLEPKPQGCYLVRFSESAVTFVLTYRSRTCCRHFLLAQLRDGRHVVLGEDSAHARLQDLLRHYTAHPLSPYGETLTEPLARQYSP

SEQ ID NO: 2360 - protein, 110 aa, Artificial Sequence
  Description of Artificial Sequence:  Synthetic peptide
APLILQNGVLPAWFHGFITRKQTEQLLRDKALGSFLIRLSDRATGYILSYRGSDRCRHFVINQLRNRRYLISGDTQSHGTLAELVHHYQEVQFEPFGETLSAACPRMEDN

SEQ ID NO: 2361 - protein, 111 aa, Artificial Sequence
  Description of Artificial Sequence:  Synthetic peptide
AGYERSSNTIAPWFHGIISRQESEALLTNAVEGSFLVRVSERIWGYTLSYRNPSGFKHFLIDASGDHYNFLGVDQNRHATLADLINFHKEEVITTSGGELLQDPCRPRSSA

SEQ ID NO: 2362 - protein, 111 aa, Artificial Sequence
  Description of Artificial Sequence:  Synthetic peptide
ANLSQGTSAHRPWYFSKISRSEAEQLLLSPPNQHGSFLVRDSESSRGEYSLSVRNHTKVSHFRICKSPAGSLYIQRGHPFPDMEELLAFYTENWKVIQSPLLQPCIPTVPG

SEQ ID NO: 2363 - protein, 113 aa, Artificial Sequence
  Description of Artificial Sequence:  Synthetic peptide
SDGEAELLQDLGWYHGNLTRHAAEALLLSNGCDGSYLLRDSNETTGLYSLSVRAKDSVKHFHVEYTGYSFKFGFNEFSSLKDFVKHFANQPLIGSETGTLMVLKHPYPRKVEE

SEQ ID NO: 2364 - protein, 113 aa, Artificial Sequence
  Description of Artificial Sequence:  Synthetic peptide
SSEDIDELEAVSWYHYDLSRHAAEALLLSNGVDGNFLLRNSNKGVDCFALSVRAKDSVKHFHVRRQFGRYSFGFNEFPSLQDFCSHLANQPLLGSETGNLIVLRFPYPRQVEE

SEQ ID NO: 2365 - protein, 111 aa, Artificial Sequence
  Description of Artificial Sequence:  Synthetic peptide
VLAAVRKLQESGFYWSTVSGKEASTLLSSEPPGTFLVRDSSDHHHFFTLSVKTATGTKNLRIQCDSSSFFLQTDPRSEQVVPRFDCVLKLIHHYMPSAGTVSSSNAGEGSA

SEQ ID NO: 2366 - protein, 117 aa, Artificial Sequence
  Description of Artificial Sequence:  Synthetic peptide
SKQDGSPQSVEAWREIQRWEAEKSLMKIGLQKGTYIIRPSRKENSYALSVRDFDEKKKICIVKHFQIKTLQDEKGISYSVNIRNFPNILTLIQFYEKNGIGNTHIPLTDPMPDNYQP

SEQ ID NO: 2367 - protein, 109 aa, Artificial Sequence
  Description of Artificial Sequence:  Synthetic peptide
SILDRLLLTGPVWFQLSINPATALHILQREPPGTFLVRKSRTSQRNVLCVRLADDSVPSFVQQFGIREEQSTLSLETSTISFPDLPRLVSFYCISRWTTHSSLPIITYS

SEQ ID NO: 2368 - protein, 117 aa, Artificial Sequence; identical to SEQ ID NO: 2366
  Description of Artificial Sequence:  Synthetic peptide

SEQ ID NO: 2369 - protein, 122 aa, Artificial Sequence
  Description of Artificial Sequence:  Synthetic peptide
YVAPVDSIQAEEWYFGKISRKDAERQLLSSGNPQGAFLIRESETTKGAYSLSIRDWDQNRGDHIKHYKIRKLDTGGYYITTRAQFDSIQDLVQHYMEVNDGLCYLLTAPCTTTKPQTLGLAK

SEQ ID NO: 2370 - protein, 157 aa, Artificial Sequence
  Description of Artificial Sequence:  Synthetic peptide
IKKHLLALWNDGCIVGFISKERERALLKDQQPGTFLLRFSESCREGAITFTWVERGITCGCARMRAGCLRGSWDWFSTLPSDRACARLYGVYLGFLSDAVHPWQNKPYFHAVEPYTKKELSAVTFPDIIRNYKVMAAENIPENPLKFLYPNIDKDHA

SEQ ID NO: 2371 - protein, 113 aa, Artificial Sequence
  Description of Artificial Sequence:  Synthetic peptide
AGYQKNSDTIAPWFHGILTLKKANELLSTGVPGSFLIRVSEKIKGYALSYLSEEGCKHFLIDASANSYSFLGVDQLQHATLADLVEYHKNGGKMSPLRDEIIFKRPPFLCLLE

SEQ ID NO: 2372 - protein, 111 aa, Artificial Sequence
  Description of Artificial Sequence:  Synthetic peptide
TENSDGQKQNNEWFHGVLQRQDADELLVKPGSFLLRASEVHGKMSMILSVRHDGKLHNIAVNSDTGENFWFEGHREKSIDQLVQWHMTTSTPITKTSGVKLKYPIGKADWI

SEQ ID NO: 2373 - protein, 110 aa, Artificial Sequence
  Description of Artificial Sequence:  Synthetic peptide
KLIATTAHEKMPWFHGRISREESEHRILIGSRNDGKFLIRERDSNGSYALCLLNDGKVLHYRIDRDKTGKLSIPDGKRFDTLWQLVEHYSYKPDGLLRVLSIPCPRHGSE

SEQ ID NO: 2374 - protein, 117 aa, Artificial Sequence
  Description of Artificial Sequence:  Synthetic peptide
MAGNFDAEDQNSWYWGRLGRQEAVSLLQGQRHGVFLVRDSSSIHGDYVLSVSENSKVSHYIINSISNNRQSGSGSAHPRLRIGDQEFVALSALLEFYKIHYLDTTTLIEPINKSKFA

SEQ ID NO: 2375 - protein, 115 aa, Artificial Sequence; identical to SEQ ID NO: 2356
  Description of Artificial Sequence:  Synthetic peptide

SEQ ID NO: 2376 - protein, 119 aa, Artificial Sequence
  Description of Artificial Sequence:  Synthetic peptide
KPKALLGLERYEWYVGDMSRQRAESLLKQGDKEGCFVVRKSSTKGLYTLSLHTKVPQSHVKHYHIKQNARCEYYLSEKHCCETIPDLINYHRHNSGGLACRLKSSPCDRPVPPTAGLSH

SEQ ID NO: 2377 - protein, 115 aa, Artificial Sequence
  Description of Artificial Sequence:  Synthetic peptide
ITKTSSMLDTCGFYWGPMDVNMAHNKLKLEPVGTFLIRDSRQKNCFFAISVKTAKETVSIRIKFHAGKFSLDGSKESFSCLLQLVEHYMTSPKKMLISPLRKVRLRPLQELCRKS

SEQ ID NO: 2378 - protein, 122 aa, Artificial Sequence
  Description of Artificial Sequence:  Synthetic peptide
YVAPVDSIQAEEWYFGKISRKDAERQLLSDGNPQGAFLIRESETTKGAYSLSIRDWDQNRGDHIKHYKIRKLDMGGYYITTRAQFESVQDLVRHYMEVNDGLCYLLTAPCMVMKPQTLGLAK

SEQ ID NO: 2379 - protein, 107 aa, Artificial Sequence
  Description of Artificial Sequence:  Synthetic peptide
MAGNFDSEDRGSWYWGRLSRQEAVSLLQGQRHGVFLVRDSITIPGDYVLSVSENSKVSHYIINRLAPPRFRIGDQEFDALPALLEFYKIHYLDTTTLIEPISKSKHS

SEQ ID NO: 2380 - protein, 132 aa, Artificial Sequence
  Description of Artificial Sequence:  Synthetic peptide
PPSREIDYTAYPWFAGNMERQQTDNLLKSHASGTYLIRERPAEAERFAISIKFNDEVKHIKVVEKDSWIHITEAKKFESLLSILSAIFGSPAPEGEVFEALAILAGLGWRAGGVLPVSLTQGKLQAVGHYTQ

SEQ ID NO: 2381 - protein, 115 aa, Artificial Sequence
  Description of Artificial Sequence:  Synthetic peptide
ASMQRPSIEKEPYYHGFLPREDVKTVLKNNGDFVIRISEPQAGSPRSNILSVMHCVPPMEEEIKHYVIKTKGDKIFIEKVSFLSIPEMVEWHLTKKESVQKDVFLIKAISRQAWE

SEQ ID NO: 2382 - protein, 124 aa, Artificial Sequence
  Description of Artificial Sequence:  Synthetic peptide
GVKPEEMHVTEEWFHGRCERDEAKKRILEHKEKGNGLFMIRDSNLFIGDFSLSILHDGKVHHVRIRSKIIDKEKKYYFMDNKVCDTLYELVSYYTRHYLTTAHFKMVLTIPCPQPQPHLNQPWF

SEQ ID NO: 2383 - protein, 126 aa, Artificial Sequence
  Description of Artificial Sequence:  Synthetic peptide
LTEELLKLSNYGWYWGPISGNEADAKLLSEPDGAFLVRDSSDDRYVLTLSFKSSGKLLHARMEHSGGLFSLCNQSESEGFTSVADLIDYSMSFSQSAVFCYSRPKYPGHPSFPVRLTKPVSRFTQV

SEQ ID NO: 2384 - protein, 129 aa, Artificial Sequence
  Description of Artificial Sequence:  Synthetic peptide
TSSDEKDVQNNDWYIGEHSRQAVEEALRKENKDGTFLVRDCSTKSRAEPYVLVVFYGNKVYNVKIRFLEKNQQFALGTGLRGDEKFNSVEDIIEHYKYFPIILIDGKDKTGIHKEQCYLTQPLPLSRCF

SEQ ID NO: 2385 - protein, 119 aa, Artificial Sequence
  Description of Artificial Sequence:  Synthetic peptide
VAPPRLLEAIQINCHGPLSTEFAVSRLRRCEGQPGVYILRCSPKDYDRYFLSFMVEAEGQLELKHCLVLRSLSGEFVLSGARCSFSSLSELLARYQKEALRSDTHVFQLRRCCPPRSKD

SEQ ID NO: 2386 - protein, 108 aa, Artificial Sequence
  Description of Artificial Sequence:  Synthetic peptide
MADVAQNLPYFFGNITREESEDYLRQAGATDGLYLLRQSRSYLGGYALSVAHGRHFYHYTIERELNGTYAISGGISHSSPAELCHYHTLESSGLVCLLKKPCNRQPGV

SEQ ID NO: 2387 - protein, 107 aa, Artificial Sequence
  Description of Artificial Sequence:  Synthetic peptide
SSARFDSSDRASWYFGPVSRQEAQNRLQGQRHGMFLVRDSSTCPGDYVLSVSENSKVSHYIINSLPSKRFKIGDQEFDNLPGLLEFYKIHYLDTTTLIEPAPRYPST

SEQ ID NO: 2388 - protein, 117 aa, Artificial Sequence
  Description of Artificial Sequence:  Synthetic peptide
VPKNYISLRPHAWFAGRISRHVAENRLHQRDCGSFLVRESESAPGEFSMSVSYGDHVQHFKVLKDREGYYFVWEEIFPSLNQLVDFYKTNSIAKERTVFLRDLDHTLKRPHHAHALF

SEQ ID NO: 2389 - protein, 111 aa, Artificial Sequence
  Description of Artificial Sequence:  Synthetic peptide
MASFDVYDRSSWYFGAMSRQDATDLLLNERESGVFLVRDSTTIVGDFVLCVREDSKVSHYIINKLPSGDECFVYRIGDQTFADLPDLLSFYKLHYLDTTPLRRPMVRRLEK

SEQ ID NO: 2390 - protein, 112 aa, Artificial Sequence
  Description of Artificial Sequence:  Synthetic peptide
YPLTRFDLEQNRWFCKDITRAKAEQLLRQAGSEGSFLVRESSQVGKLTVSVYSCIPCEVVKHYHVKQLPTGEWYLAEKHTFSTISDLIHYHQHNAAGLVTRLRHPVRPGEEL

SEQ ID NO: 2391 - protein, 104 aa, Artificial Sequence
  Description of Artificial Sequence:  Synthetic peptide
AMKVTREHLRGPWMDGSIIGFIHKSKAEDYLLKCPRGTFLLRFSDSELGGITIAWVNEGNDGQPQILHIQPFTAKDFSTRSLSDRIRDFDDLFYLYPNKPKHEA

SEQ ID NO: 2392 - protein, 139 aa, Artificial Sequence
  Description of Artificial Sequence:  Synthetic peptide
KSISAFSPPLPGWYWGNMSVAEAKERLQDAPEGTFLVRDSSHSEYLLTISVKTSAGPTNLRIEYQDGKFRLDSITCVRSRLKQFNSVVHLIEYYVLMCKDRTETPSNGTVHLYLNKPLYTSAPSLQHRCRITINKCTNQ

SEQ ID NO: 2393 - protein, 122 aa, Artificial Sequence
  Description of Artificial Sequence:  Synthetic peptide
VAPPSLLEDIQNYCHGPITSEFAVHKLKKAGAKNGMFLLRHSPKDFDKYFLTVCIQTHLGMDYKDCLIEKNEKFILAGIHNSFCSLKQLTDFYQHSTLLMSDIPVTLGKCCPPRPKELTNMI

SEQ ID NO: 2394 - protein, 128 aa, Artificial Sequence
  Description of Artificial Sequence:  Synthetic peptide
VAPPLIVHNIQNGCHGPICTEYAINKLRQEGSEEGMYVLRWSCTDFDNILMTVTCFEKSEVLGGQKQFKNFQIEVQKGRYSLHGSMDHFPSLRDLMNHLKKQILRTDNISFVLKRCCQPKPREISNLL

SEQ ID NO: 2395 - protein, 123 aa, Artificial Sequence; identical to SEQ ID NO: 2285
  Description of Artificial Sequence:  Synthetic peptide

SEQ ID NO: 2396 - protein, 108 aa, Artificial Sequence
  Description of Artificial Sequence:  Synthetic peptide
PVPQPNAHESREWYHSSLTRVQAEHMLMRVPRDGAFLVRKRSEHNSYAISFRAEGKIKHCRIQQEGRLFMLGSSAEFESLMDLVSYYEKHPLYRKMKLRYPINEDTLD

SEQ ID NO: 2397 - protein, 118 aa, Artificial Sequence
  Description of Artificial Sequence:  Synthetic peptide
FKLPSEDVRSHAWFHGGISREKAEKLIRENGDFLVRDSISKPGNFVLTVRWKGVSMHFVVNKVVLKAHSPYASVQYQFEKECFDAIPSLIKFYVGNCRPVSQASGAVIQHPVNRTLPL

SEQ ID NO: 2398 - protein, 122 aa, Artificial Sequence
  Description of Artificial Sequence:  Synthetic peptide
YVAPADSIQSEEWYFGKLSRKDTERLLLLPGNERGTFLIRESETTKGAYSLSLRDWDETKGDNCKHYKIRKLDNGGYYITTRTQFMSLQMLVKHYTEHVDGLCYKLTTVCPQVKPQTQGIAK

SEQ ID NO: 2399 - protein, 108 aa, Artificial Sequence
  Description of Artificial Sequence:  Synthetic peptide
MPSDFCWDFGMCSRQDAEKKLMAIGINKGQFIVRDKDPGTFELSVRDNDPQKGDHVKHYKIHQQGRGNGFFIFQGSVFPTVSELVRHYQSNIGLCCILTEACPKENPN

SEQ ID NO: 2400 - protein, 113 aa, Artificial Sequence
  Description of Artificial Sequence:  Synthetic peptide
RVDPSLPLEKQVWYHGSLSRSEAESLLTLCKECSYLVRNSETSRLDYSLSLRSCQGFMHMKFSQCKDGRYILGQNSPPFETIPEVIHYYTTHKLPIKGAEHLSLLFPVLVQTL

SEQ ID NO: 2401 - protein, 102 aa, Artificial Sequence
  Description of Artificial Sequence:  Synthetic peptide
RVDPALPLEKQPWFHGPLNRADAESLLSLCKEGSYLVRLSETNPQDCSLSLRSSQGFLHLKFARTRENQVVLGQHSGPFPSVPELVLHYSSRPLPVQGAEHL

SEQ ID NO: 2402 - protein, 119 aa, Artificial Sequence
  Description of Artificial Sequence:  Synthetic peptide
NMNGFDPFEWRSFYFPGMSREDAHKLLGEPRVSIGTFLMRDSSQPGEYSLSVREADEGNTVCHYLIVRDVKEDGTAGVKIAEQSFPDIPALLNHFKMRVLTEASLLSAYKKPIIEVVVG

SEQ ID NO: 2403 - protein, 139 aa, Artificial Sequence
  Description of Artificial Sequence:  Synthetic peptide
STGRAQRVVNHPLFKPFNSTQAEEYLGSQPSGEVVIRPSSKGNDHLAVTWKVADGVFQHVDVLELQKENEFAVGRVLRVGKYTYQDLDELIVDHVKAMAKKVDELMQCDKFQKGSRNETEKWLTTYMDANPNRSTYAFC

SEQ ID NO: 2404 - protein, 108 aa, Artificial Sequence
  Description of Artificial Sequence:  Synthetic peptide
SPRPPVVHESKEWFHSRLSRHEAEDMLKRVPQDGAFLVRKSERESDAFAISFRADGKIKHCRIKQEGRLFTIGSAQFESLAELCGYYHKYPLYRKMKLKSPVNQEVVD

SEQ ID NO: 2405 - protein, 120 aa, Artificial Sequence
  Description of Artificial Sequence:  Synthetic peptide
LVPDLLQINNNPCYWGVMDKYAAEALLEGKPEGTFLLRDSAQEDYLFSVSFRRYSRSLHARIEQWNHNFSFDAHDPCVFHSPDITGLLEHYKDPSACMFFEPLLSTPLIRTFPFSLQHIC

SEQ ID NO: 2406 - protein, 116 aa, Artificial Sequence
  Description of Artificial Sequence:  Synthetic peptide
YVAPVDSIQAEEWYFGKLGRKDAERQLLSFGNPRGTFLIRESETTKGAYSLSIRDWDDMKGDHVKHYKIRKLDNGGYYITTRAQFETLQQLVQHYSERAAGLCCRLVVPCHKGMPR

SEQ ID NO: 2407 - protein, 116 aa, Artificial Sequence
  Description of Artificial Sequence:  Synthetic peptide
YIEPADLLQSEDWFFEKMTRKDAEKQLQLTSNSRGTFLVRGSETSPGAYSLSVLDHDDTRGYNVKHYRIRTLDNGGYYISTRITFKTLRDLVEHYQSQADGLVCRLMTACPRQKPD

SEQ ID NO: 2408 - protein, 120 aa, Artificial Sequence
  Description of Artificial Sequence:  Synthetic peptide
AEKSGGNFERFQWYCKKIMRVQAQELLMKEGKEGAFMVRDSSQMGVYTVSVFTKATGQNGEKDPRVKHYQIRQKEAGAGEYYLAENFLFSTIPQLIHYHQHNAAGLITRLRYPVSPSGRC

SEQ ID NO: 2409 - protein, 111 aa, Artificial Sequence
  Description of Artificial Sequence:  Synthetic peptide
AKATPEPPSDQPWYFSGISRAQAQQLLLSPANAPGAFLIRPSESSIGGYSLSVRAQAKVCHYRICMAPSGSLYLQEGQLFPSLDALLAYYKTNWKLIQNPLLQPCIPQIPL

SEQ ID NO: 2410 - protein, 128 aa, Artificial Sequence
  Description of Artificial Sequence:  Synthetic peptide
MNVKFVQDTSKFWYKPDISREQAINLLKDREPGAFIIRDSHSFRGAYGLAMKVACPPPTVPQNKKVGDLTNELVRHFLIETSAKGVRLKGCPNEPYFGCLSALVYQHSMTPLALPCKLMIPTKDPNEE

SEQ ID NO: 2411 - protein, 115 aa, Artificial Sequence
  Description of Artificial Sequence:  Synthetic peptide
TRGTRRLPMDLPYYHGPLSKRDCETLLLKEGVDGNYLLRDSESMPGVLCLCVSFKNFVYTYRIFKEKHGYFHIQTAEGIRRQIFPNLKELISKFEEPHQGLMFHLVKPIKRTGSC

SEQ ID NO: 2412 - protein, 108 aa, Artificial Sequence
  Description of Artificial Sequence:  Synthetic peptide
AVPNPSPHENKDWYYSNLSRGEAEDMLMRIPRDGAFLIRKRDEPDSFAMTFRAEGKVKHFRIQQEGRHFVLGTSAYFESLVELVTYYEKHPLYRKMKLRYPVTEELLE

SEQ ID NO: 2413 - protein, 113 aa, Artificial Sequence
  Description of Artificial Sequence:  Synthetic peptide
TLADDSHQKESSWYGGSMKRKEAEELLKGRRDGTFLIRDSQTQRGSFACSVVVNGDVKHCVIYRTPAGYGFAEPYNLHASLRDLVLHYRHTSLVQHNQQLNVTLAWPALSQQP

SEQ ID NO: 2414 - protein, 108 aa, Artificial Sequence
  Description of Artificial Sequence:  Synthetic peptide
VAPTEDQLRREMWYHGRMSRRDAENLLGRDGDFLVRDSATNPGQYVLTGMQCGLPKHLLLVDPEGVVRTKDMLFESISHLINYHLTNKLPIVAAESELHLQQVVCRKI

SEQ ID NO: 2415 - protein, 108 aa, Artificial Sequence
  Description of Artificial Sequence:  Synthetic peptide
NPRHEVKLNAMPWFHGKISRETAERLLRPREDGLFLVRESTNFPGDYTLCVCYQGRVQHYRVKYKNNQLTIDDEEFFENLALLVEHYEQDADGLCTQLTKSLPKEGKQ

SEQ ID NO: 2416 - protein, 123 aa, Artificial Sequence
  Description of Artificial Sequence:  Synthetic peptide
SVSMAEQLRGEPWFHGKLSRREAEALLQLNGDFLVRESTTTPGQYVLTGLQSGQPKHLLLVDPEGVVSVAEVWVRGGKKEGTVPYSVSLFLPSLLCRHSRWAAVYGPLLLFKVSGIFLQRLIP

SEQ ID NO: 2417 - protein, 111 aa, Artificial Sequence
  Description of Artificial Sequence:  Synthetic peptide
IKKHLLNIWNDGHIIGFLSKGQEKALLRDKLPGTFLLRFSETCREGGITITWVEYSKNGEPKMHSVKPYTKSDLASISLPNVIRDYTLTAAEKVPVNPLIYLYPDIPKDEA

SEQ ID NO: 2418 - protein, 123 aa, Artificial Sequence
  Description of Artificial Sequence:  Synthetic peptide
YPLNCKDPTSERWYHGHLSGRDAEKLLTDRGKAGSFLVRESQSKPGDFVLSVITNEEKHENVDRKTKVTHVMIRYQDGKYDVGGGERFDTLADLVDHYKKNPMVEKSGIVVHLKQPFNATRIN

SEQ ID NO: 2419 - protein, 139 aa, Artificial Sequence
  Description of Artificial Sequence:  Synthetic peptide
DSMAHVNATARVWYRPKLSREEAISILRQQVPGSFLIRDSTTYKDAFGLAVKVATLPPKVTPKSGLTKFVRSIFNDLQSELVRHYLIEAVNTPTKGVRLKGFASEPVFPSLAALINRHTQDALALPCRLILPAIPTTPL

SEQ ID NO: 2420 - protein, 139 aa, Artificial Sequence
  Description of Artificial Sequence:  Synthetic peptide
RERRIKRTVVHPLWHDFSCLEAETYLSDKPIGDVLLRPSSKGHDHITATFKFADSIFLHHDIKEADKPNAVSLGKSFYMGDVKYDSLDEILARHVEYLINNLNEVKSNTAHWKDGNRSDVDDLIREEKKKNPKTIPYYF

SEQ ID NO: 2421 - protein, 104 aa, Artificial Sequence
  Description of Artificial Sequence:  Synthetic peptide
ALRAHEELEDQRWYHGEMSRRQAEKLLLHDGDFLVRKSTTNPGSYVLTGMHNGLAKHLLLVDPEGTVRTHTHTLRQVVKVYTVKVRLISAPLLLILQPPHQIPE

SEQ ID NO: 2422 - protein, 111 aa, Artificial Sequence
  Description of Artificial Sequence:  Synthetic peptide
PMQKQMVELGKRWFFGPIKRADAERQLLYPGNQAGAFLIRESESLKGEYSLSVFDGQSVKHYRIRRLDGEGFFLSRMKTFKTLNEFVDYYSKNSDGLCVKLGKPCPKVQIP

SEQ ID NO: 2423 - protein, 124 aa, Artificial Sequence
  Description of Artificial Sequence:  Synthetic peptide
VTPNEELHYSEPWFHGKLNTNADQLPRMVAEELLTRYQQGDGTFLVRESETFKGDYSLSFWAMGKVNHCRIKSKLDRGQSKYFLVENMPFDSLYTLINHYRAVPLRSRDLEVRLTEPVPQPPSH

SEQ ID NO: 2424 - protein, 130 aa, Artificial Sequence
  Description of Artificial Sequence:  Synthetic peptide
GTNEKFRVHHLKCYHGVQKKEEVARLMKDSGPGTFLVRSSFLRSEVALGLFLSVKVGVGEVDCIHHYLIDCRSGEYYLIQEFKDNKENGKSVTVESKPFPTLEEMIEYYQHHRLACKIRLGRPLKRPPWQ

SEQ ID NO: 2425 - protein, 123 aa, Artificial Sequence
  Description of Artificial Sequence:  Synthetic peptide
YVAPSDSIQAEEWYFGKITRRDSERLLLNLENRRGTFLVRESETTKGAYCLSVLDYDNVKGLNVKHYKIRKLDSGGFYITSRTQFSTLQQLVNHYRQHADGLCHSLTDVCPVLKPPTQGLARD

SEQ ID NO: 2426 - protein, 112 aa, Artificial Sequence
  Description of Artificial Sequence:  Synthetic peptide
YVARVDSLESKEWYFKDMGRKEAERQLLSPLNTCGAFMIRDSETTKGSFSLSVRDSGDTVRHYKIRTHEDGGFFISTRITFPSLPELVSHYQGKMSGLCQCLTVPCQTLRPE

SEQ ID NO: 2427 - protein, 113 aa, Artificial Sequence
  Description of Artificial Sequence:  Synthetic peptide
RIDPALPLEGQFWYHGAISRTDAEALLRLCKEASYLVRNSETSKNDFSLSLKSSQGFMHMKLSRTKDSKYVLGQNSCLFDSVPEIIHYYSSRKLPIKGAEHMSLLYPVAIRTL

SEQ ID NO: 2428 - protein, 108 aa, Artificial Sequence
  Description of Artificial Sequence:  Synthetic peptide
NGEDSEDLDRASWFQAGLPRELSLEVLTQQSPGAFLVRRSTTKHGCFALSLRVPPGSGPKVVHYLIMKTERGYKIKGFTKEFSSLRALITHHSVMPEMLPVPLSLPRP

SEQ ID NO: 2429 - protein, 108 aa, Artificial Sequence
  Description of Artificial Sequence:  Synthetic peptide
ALRIDPKLSLMPWFHGKIAGQQAVDKLKPTEDGLFLVRESVRHPGDFVLCVCFSQKVFHYRVIYQDNKLTIDNMQFFDNLIDMIEFYSRNRGAIATLLLKPKKKEGLK

SEQ ID NO: 2430 - protein, 122 aa, Artificial Sequence
  Description of Artificial Sequence:  Synthetic peptide
YVAPSDSIQAEEWYFGKITRRDSERLLLNLQNRRGTFLVRESETTKGAYCLSVLDYDNTKGLNIKHYKIRKLDSGGFYITSRTQFTSLQQLVFHYRKHSDGLCHALTDVCPVAKPQTQGLAK

SEQ ID NO: 2431 - protein, 122 aa, Artificial Sequence
  Description of Artificial Sequence:  Synthetic peptide
YVAPADSIAAEEWYFGKMGRKDAERLLLNPGNQRGIFLVRESETTKGAYSLSIRDWDEIRGDNVKHYKIRKLDNGGYYITTRAQFDTLQKLVKHSTEHADGLCHKLTTVCPTVKPQTQGLAK

SEQ ID NO: 2432 - protein, 110 aa, Artificial Sequence
  Description of Artificial Sequence:  Synthetic peptide
VAIPLTAPPTNQWYHGKLDRTIAEERLRQAGKSGSYLIRESDRRPGSFVLSFLSQMNVVNHFRIIAMCGDYYIGGRRFSSLSDLIGYYSHVSCLLKGEKLLYPVAPPEPV

SEQ ID NO: 2433 - protein, 115 aa, Artificial Sequence
  Description of Artificial Sequence:  Synthetic peptide
MTDKDLLHQKYYHGLLPREDIQEMLNKPGQFLLRTSEPVKGEKRQFVLSVVGEKNTSANHFVVREADHKVYVDKIGFPTIIELVNHYVSTKESFSTKDGTVKVVLKHAVERQKWE

SEQ ID NO: 2434 - protein, 129 aa, Artificial Sequence
  Description of Artificial Sequence:  Synthetic peptide
VSVNFVQDTSKFWYKADISREQAIAMLKDKEPGSFIVRDSHSFRGAYGLAMKVATPPPSVLQMNKKAGDLANELVRHFLIECTPKGVRLKGCSNEPYFGSLTALVCQHSITPLALPCKLLIPDRDPLEE

SEQ ID NO: 2435 - protein, 140 aa, Artificial Sequence
  Description of Artificial Sequence:  Synthetic peptide
VAPPRLVMSVANGIHGPLQEQYVVQKLRREEQEEGVYIIRWSAFTFNIIIMAVKSTSQSKGFAYKQFKIEKKGEVFSLEDWDREFHSVKELVESLRGCTLKSGKETFTVKKCILPKSGEVSNLTVSRRGKNSKDRTVSKN

SEQ ID NO: 2436 - protein, 119 aa, Artificial Sequence
  Description of Artificial Sequence:  Synthetic peptide
KKERKRRYFRQDWFWGMITQTEAEGHLKDCRHGEFLVRSMLFQDNPIVVIDVVVVSDKSRTFQQFQASPVVSKWQLDSYPSRHKTLVDLVAYYNRHFIGMTGLKLKTAAKQPDWFLKSY

SEQ ID NO: 2437 - protein, 102 aa, Artificial Sequence
  Description of Artificial Sequence:  Synthetic peptide
DDEDLPHHDERSWKLGNINRIQAEALLRGKRDGTFLVRDSSKAGCYACSVVYTPTGYGFAEPYNLYNSLKELVLHYQHTSLVQHNDSLNVTLAYPVYGHQRR

SEQ ID NO: 2438 - protein, 122 aa, Artificial Sequence
  Description of Artificial Sequence:  Synthetic peptide
YVAPVDSIQAEEWYFGKIGRKDAERQLLSPGNSRGAFLIRESETTKGAYSLSIRDWDQTRGDHVKHYKIRKLDTGGYYITTRAQFDTVQELVQHYLEVNDGLCHLLTAACTTMKPQTLGLAK

SEQ ID NO: 2439 - protein, 118 aa, Artificial Sequence
  Description of Artificial Sequence:  Synthetic peptide
MDLPYYHGCLTKPECEALLLKGGADGNFLIRDSESVPGALCLCVSFKKRVYNYRILREKHGYYIMETMEVAMPIAVQAKPSTSKEVFPTLEEIIFKFKTPGQGMVVHLSNPIMRRSFC

SEQ ID NO: 2440 - protein, 108 aa, Artificial Sequence
  Description of Artificial Sequence:  Synthetic peptide
VAPTEEQLRQEPWYHGRMSRRAAERMLRADGDFLVRDSVTNPGQYVLTGMHAGQPKHLLLVDPEGVVRTKDVLFESISHLIDHHLQNGQPIVAAESELHLRGVVSREP

SEQ ID NO: 2441 - protein, 113 aa, Artificial Sequence
  Description of Artificial Sequence:  Synthetic peptide
CVPKPVDYSSQLWFAGPMERVQAEAALLNKRSSTYMVRHRSREFHEYAISIKYKNDVKHIKILTKDGLFYIAENRKFSSILDLIQYYKIHSLREGFRTLDTTLKFAYREPENG

SEQ ID NO: 2442 - protein, 135 aa, Artificial Sequence
  Description of Artificial Sequence:  Synthetic peptide
AKASPETLSDQPWYFSGVSRTQAQQLLLSPPNEPGAFLIRPSESSLGGYSLSASSGVGGSGQLAAKAGVSISEPFLVRAQAKVCHYRVSMAADGSLYLQKGRLFPGLEELLTYYKANWKLIQNPLLQPCMPQKAP

SEQ ID NO: 2443 - protein, 101 aa, Artificial Sequence
  Description of Artificial Sequence:  Synthetic peptide
DRPAITAPPESEWYHGRLDRYSAEQRLKSTTKLGSYLVRESDRKPGSYVLSYLGRTGINHFRITAVCGDFYIGGRQFFSLSDLVGYYTSCSDLLKRERLVQ

SEQ ID NO: 2444 - protein, 104 aa, Artificial Sequence
  Description of Artificial Sequence:  Synthetic peptide
ADGGSDLFQDLGWYHSNLTRHAAEALLLSNGRDGSYLLRDSNEQTGLYSLSVRAKDSVKHFHVEYTGYSFKFGFNEYSSLKDFVKHFANQPLIGSETVNSGVVF

SEQ ID NO: 2445 - protein, 116 aa, Artificial Sequence
  Description of Artificial Sequence:  Synthetic peptide
DQALMKQLDNCSYFVGQPTKDSMVYNLLSQPEGAFVIRYSESKSKCLALSMRVPVTHNPAGISHYLIIRNEHGFRLKLSATKKPFPTLQMMLTHYSVLESHLPCTLHFVQWQKTNF

SEQ ID NO: 2446 - protein, 122 aa, Artificial Sequence
  Description of Artificial Sequence:  Synthetic peptide
YVAPSDSIQAEEWYFGKITRRESERLLLNAENPRGTFLVRESETTKGAYCLSVSDFDNAKGLNVKHYKIRKLDSGGFYITSRTQFNSLQQLVAYYSKHADGLCHRLTTVCPTSKPQTQGLAK

SEQ ID NO: 2447 - protein, 108 aa, Artificial Sequence
  Description of Artificial Sequence:  Synthetic peptide
SLKEQHELKGAPWFQAGIPREISLEVLSRQNPGAFLVRQSTTKPGCFALSLRVPPPAPKVAHYLILRTIRGYKIKGFTKEFTSLRALITHHSVMPELLPVPLALPRPP

SEQ ID NO: 2448 - protein, 123 aa, Artificial Sequence
  Description of Artificial Sequence:  Synthetic peptide
VAPPLIVHNIQNGCHGPICTDIAFNKLRQEGSEEGMYVLRWSCTDFDNILIAVSCFEKSEVLGNQKQFKNFQIEVQKGRYSLHGSVDHFPSLRDLMNHLKKQILRTDNISFVLKRCCQSKPRE

SEQ ID NO: 2449 - protein, 115 aa, Artificial Sequence
  Description of Artificial Sequence:  Synthetic peptide
GDSGGNHRSKKSWFHPNITGVEAENLLLTRGVDGSFLARPSKSNPGDFTLSVRRNGAVTHIKIQNTGDYYDLYGGEKFATLAELVQYYMEHHGQLKEKNGDVIELKYPLNCADPT

SEQ ID NO: 2450 - protein, 110 aa, Artificial Sequence
  Description of Artificial Sequence:  Synthetic peptide
NYLARDSVESQPWFFGKMNRVGAVSHLMSDENNYGSFLVRVSESDDMGYVLSVRTKENAKHFKIFQTGDQFYVDALFKFSSIVEVIEHYQSHPLSIGDLLSEPCIRIKPE

SEQ ID NO: 2451 - protein, 110 aa, Artificial Sequence
  Description of Artificial Sequence:  Synthetic peptide
DEDEEPELLACPWYQPRITAKAALEHLQQATPGSFLLRRSTPRHFELVLRLERNNKVKTYPVQSTRNQMYRLKGAKKQFTSLKALITHHSVMAEQLPLVLDMPRERHVVK

SEQ ID NO: 2452 - protein, 123 aa, Artificial Sequence
  Description of Artificial Sequence:  Synthetic peptide
TADQDAGVHSKAWYAATCDRKTAEDALYRSNKDGSFLIRKSSGQDSRQPYTLVVFYNRRVYNIPIRFIESTRQYALGREKCGEERFDSVAEIVENHQHTSLVLIDSQNNTKDSTKLKYIVRVS

SEQ ID NO: 2453 - protein, 117 aa, Artificial Sequence
  Description of Artificial Sequence:  Synthetic peptide
VVQITPEIKGCQFYHGIIPRVDAELSLRYVGDYLLRRAEPRENAGGQFLIISVKREAGFVHVPISQDKEGAKQFYFMPTLKENTVLDLIDVHLARAQPVCVQWNVYLRKPVLRATWI

SEQ ID NO: 2454 - protein, 140 aa, Artificial Sequence
  Description of Artificial Sequence:  Synthetic peptide
TTGRTQRVVKHPNFKPFNGLQAEEYLGSQPNGEVVIRPSSKGNDHLAVTWKVADGVFQHIDVLEMQKETEFAVGKLLRVGGKYTYTDLDELIVEHVKAMARKVEELMRHDKYQNRSRGETEKWLTTYIDANPNRSTYAFC

SEQ ID NO: 2455 - protein, 107 aa, Artificial Sequence
  Description of Artificial Sequence:  Synthetic peptide
SLGIFQDVINSKIFSGFISGIEATQLLSRQQVGYYLLRCSKTIVGAFAITFVDSTNHIRHCLLYPVTSSINGGLTLQKPPDIFKSILSFILSFSSKLKYPIGPLDND

SEQ ID NO: 2456 - protein, 107 aa, Artificial Sequence
  Description of Artificial Sequence:  Synthetic peptide
LTCRWFHRSVSGVEAETMLLERGFDGSFLARYSSSSPGAFTLSVRRGQEVTHIKIQNNGDFFDLYGGEKFATLSELVQYYMENGDQLKEKNGQIIELKQPLICAEPT

SEQ ID NO: 2457 - protein, 122 aa, Artificial Sequence
  Description of Artificial Sequence:  Synthetic peptide
LVPDLRSITACSFYWGKMDRYEAERLLEGKQEGTFLLRDSAQEEFIFSVSFRKYGRSLHARIEQWNHKFSFDSHDPGVYASETVCGLIEHYKHPSCSMFFEPMLTIPFHRNFAFPLQHLCRA

SEQ ID NO: 2458 - protein, 111 aa, Artificial Sequence
  Description of Artificial Sequence:  Synthetic peptide
MKDIHFLHEKQTWFFDKLDVNFGKELLYWNGPHIGQFLIIRNNFSYTICYVCQMEDLMVIRERKIIFDISKPENGFRFSPIEKPKRDLCELIMYWTNKKNVFLGATLTRGI

SEQ ID NO: 2459 - protein, 108 aa, Artificial Sequence
  Description of Artificial Sequence:  Synthetic peptide
GVKSGGKLSLMPWFHGKITREQAERLLYPPETGLFLVRESTNYPGDYTLCVSCDGKVEHYRIIYHNGKLTIDEEEYFENLMQLVEHYTKDADGLCTRLIKPKVMEGTV

SEQ ID NO: 2460 - protein, 115 aa, Artificial Sequence
  Description of Artificial Sequence:  Synthetic peptide
VKKYILALWNEGYIMGFISKERERAILSTKPPGTFLLRFSESSKEGGVTFTWVEKDISGKFDSHPPHLSVEPYTKQQLNNMSFAEIIMGYKIMDATNILVSPLVYLYPDIPKEEA

SEQ ID NO: 2461 - protein, 114 aa, Artificial Sequence
  Description of Artificial Sequence:  Synthetic peptide
YVAPVDSIQAEEWYFGKLGRKDAERQLLSFGNPRGTFLIRESETTKGAYSLSIRDWDDMKGDHVKHYKIRKLDNGGYYITTRAQFETLQQLVQHYSEKADGLCFNLTVVSSSCT

SEQ ID NO: 2462 - protein, 114 aa, Artificial Sequence; identical to SEQ ID NO: 2461
  Description of Artificial Sequence:  Synthetic peptide

SEQ ID NO: 2463 - protein, 107 aa, Artificial Sequence
  Description of Artificial Sequence:  Synthetic peptide
LSDAEWYWGSLSREEVNNMMRNTPDGTFLVRDASSKVEGEYTLTLRKDGSNRLIKIFNKGGRAGFTEPLAFTSVVHLIRFYQNRSLAQYNAKLDTRLLYPVSRHQQV

SEQ ID NO: 2464 - protein, 114 aa, Artificial Sequence
  Description of Artificial Sequence:  Synthetic peptide
GSQLPAVHRVQPWFHGGVSRTKAERLLEEQGGVDGMYLIRDSQLHVQCFVLSLWHELKTKHYLIIPLEKGDRQYFTMDDGVTLFSDLLQLVEFHQINRGTLPVCLKHPCTCIAL

SEQ ID NO: 2465 - protein, 107 aa, Artificial Sequence
  Description of Artificial Sequence:  Synthetic peptide
ESKRRRPSDSEIYMEQNMNRVEAEKRLENRNLGDYLLRSRGEGSAALSLRATKGVVHIKIEWNGEKWVIGEGPLFRSISSAISFYRRHPLPIRGADHLVLKNQLKPV

SEQ ID NO: 2466 - protein, 123 aa, Artificial Sequence
  Description of Artificial Sequence:  Synthetic peptide
MVLENIQSNCHGPILMDFAISKLKKAGNQTGLYVLRCSPKDFNKYFLTFAIERENVIEYKHCLITKNENGEYNLSGTKKSFRNLKDLLNCYHMETVRSDSIIFQFTKCCPPKLKDKSNLLVFR

SEQ ID NO: 2467 - protein, 109 aa, Artificial Sequence
  Description of Artificial Sequence:  Synthetic peptide
VPKNFIEIEFPEWFHEGLSRHQAESLLMGKELGCFIIRASQSSPGDFSISVRHEDDVQHFKVMRDNKGNYFLWTEKFPSLNKLVDYYRKNSISKQKQIFLRDRTREEQG

SEQ ID NO: 2468 - protein, 122 aa, Artificial Sequence
  Description of Artificial Sequence:  Synthetic peptide
YVAPSDSIQAEEWYLGKITRREAERLLLSLENPRGTFLVRESETTKGAYCLSVSDYDANRGLNVKHYKIRKLDSGGFYITSRTQFSSLQQLVAYYSKHADGLCHRLTTVCPTAKPQTQGLSK

SEQ ID NO: 2469 - protein, 116 aa, Artificial Sequence
  Description of Artificial Sequence:  Synthetic peptide
IVQALNGLEKYDWYCKNINRSQAENLLKTENKDGGFLVRDSGKFTGKYTVSVFTKAGGETSGSCRHYNILLTADGQFYLAEKHNFTNIPELINYHQHNAAGLVSRLKYIVSNRAQN

SEQ ID NO: 2470 - protein, 115 aa, Artificial Sequence
  Description of Artificial Sequence:  Synthetic peptide
TENKLTNLEIYEWYHRNITRNQAERVLRQESKEGAFIVRDSRHLGSYTISVFIKARRNMEATIKHYQIKKNDSGQWYVAERHLFPSIPELIWYHQHNAAGLMTRLRYPVGLMGSC

SEQ ID NO: 2471 - protein, 110 aa, Artificial Sequence
  Description of Artificial Sequence:  Synthetic peptide
IPGKYVAKVYHGWLFEGLGREKAEELLQLPNTKVGSFMIRESETRKGLYSLSVRHREVKHYRIFRLPNNWYYISPRQTFQCLEDLVNHYSEVADGLCCVLTTPCLTQCTN

SEQ ID NO: 2472 - protein, 112 aa, Artificial Sequence
  Description of Artificial Sequence:  Synthetic peptide
AGYQKTSDTIAPWFHGILTLKKANELLLSTGMPGSFLIRVSERIKGYALSYLSEDGCKHFLIDASADAYSFLGVDQLQHATLADLVEYHKEEPITSLGKELLLYPCGQQDQL

SEQ ID NO: 2473 - protein, 118 aa, Artificial Sequence
  Description of Artificial Sequence:  Synthetic peptide
VPQDGEDFASQPWYHGPLSRQKAEALLQQDGDFLVRASRSRGGHPVISCRWQGSALHFEVLRVALRPRPGRPTALFQLEDERFPSLPSLVLSYVTGQRPLSQATGAVASRPVIRQGPI

SEQ ID NO: 2474 - protein, 138 aa, Artificial Sequence
  Description of Artificial Sequence:  Synthetic peptide
SNVKFVQDTSKFWYKPHLSRDQAIALLKDKDPGAFLIRDSHSFQGAYGLALKVATPPPSAQPWKGDPVEQLVRHFLIETGPKGVKIKGCPSEPYFGSLSALVSQHSISPISLPCCLRILSKDPLEETPEAPVPTNMST

SEQ ID NO: 2475 - protein, 123 aa, Artificial Sequence
  Description of Artificial Sequence:  Synthetic peptide
HHPLFVKDTSKYWYKPTISREQAINMLRDKPPGTFVVRDSNSFPGAFGLALKVSTPPPGVNPGDGSELVRHFLIEPSPKGVKLKGCNNEPVFGSLSALVYQHSITALALPTKLVLPDFDPAAT

SEQ ID NO: 2476 - protein, 123 aa, Artificial Sequence
  Description of Artificial Sequence:  Synthetic peptide
SAAEDSDLLTQPWYSGNCDRYAVESALLHLQKDGAYTVRPSSGPHGSQPFTLAVLLRGRVFNIPIRRLDGGRHYALGREGRNREELFSSVAAMVQHFMWHPLPLVDRHSGSRELTCLLFPTKP

SEQ ID NO: 2477 - protein, 112 aa, Artificial Sequence
  Description of Artificial Sequence:  Synthetic peptide
ARNAAPRWSTVSHFSDFLVFFRDSSCLLLADDVLGSYLLCPHPKKTNYGSLVVRTPSGLVTRLVENTRKGKFLLEKSKREFGCLAELIEHYATVDGELPCLLSCARVNHCYE

SEQ ID NO: 2478 - protein, 102 aa, Artificial Sequence
  Description of Artificial Sequence:  Synthetic peptide
ESKRRRPSDSEIHMEPNMNRVEAEKRLEHRNLGDFLLRSRGEGSAALSLRATKGVVHIKIEWNGEKWVIGEGPLFRSINSAISFYRRHPLPIRGADHLVLNH

SEQ ID NO: 2479 - protein, 88 aa, Artificial Sequence
  Description of Artificial Sequence:  Synthetic peptide
FANICRCLIEHRWYHGVMPRGEISTLLEDEGDFCVRKTTERGKPIVCISLIKTRRFYEVVELLNALVTEKIALSGAILVRAVPRPDYY

SEQ ID NO: 2480 - protein, 131 aa, Artificial Sequence
  Description of Artificial Sequence:  Synthetic peptide
FDKVYSICSIKGFMAATSSKNASQYLAGKKTGTYILRFSSDPGSYAISYLNKNKEIIHARVIYKQGSGYIHHGGQTHYATLDDLIKNTFKSLGIKEPFEGGPFHALTVAASSSKPFNIAGAYIPVAPSKKI

SEQ ID NO: 2481 - protein, 128 aa, Artificial Sequence
  Description of Artificial Sequence:  Synthetic peptide
SCGRGKLVEVPLWFHGLMERKVAEELLLKSPFRGHTSHPSSREGLFLVRQSSNRGGHFVISVCTRNHCNHYLIETIESMFYVRRDRSEDRGRDIQACDLRNLIQCYRTTPLDESGLVLKEPLLRTTPV

SEQ ID NO: 2482 - protein, 109 aa, Artificial Sequence
  Description of Artificial Sequence:  Synthetic peptide
ILKKIRSLDGVCFYHGLAARDLVETKLTRAGDYLIRATDNRTSDFEFLSFYNKKRIHSHLTIRADPDDKKWSLGILKDSLKFDKIIDLINHYKTHPLGIGFFLKRGISK

SEQ ID NO: 2483 - protein, 111 aa, Artificial Sequence
  Description of Artificial Sequence:  Synthetic peptide
RAKRTHRVINHPYYFPFNGKQAEDYLRSKERGDFVIRQSSRGDDHLAITWKLDKDLFQHVDIQELEKENPLALGKVLVVEGQRYHDLDQIIVEYLQNKIRLLNELTSNEKF

SEQ ID NO: 2484 - protein, 108 aa, Artificial Sequence
  Description of Artificial Sequence:  Synthetic peptide
IPEVQKPLCQQAWYHGAIPRSEVQELLKCSGDFLVRESQGKQEYVLSVLWDGQPRHFIIQAADNLYRLEGDGFPTIPLLIDHLLQSQQPITRKSGIVLTRAVLKDKWV

SEQ ID NO: 2485 - protein, 111 aa, Artificial Sequence
  Description of Artificial Sequence:  Synthetic peptide
YVTPLNSLEKHSWYHGPISRNAAEYLLSSGINGSFLVRESESSPGQRSISLRYEGRVYHYRISEDPDGKVFVTQEAKFNTLAELVHHHSVPHEGHGLITPLLYPAPKQNKP

SEQ ID NO: 2486 - protein, 111 aa, Artificial Sequence
  Description of Artificial Sequence:  Synthetic peptide
AGYQKTTDTIAPWFHGILTSRKAEELLSKTVPGSFLVRVSEKIKGYVLSYRSAEGCKHFLIDASSDSYSFLGVDQLQHSTLADLVDYHKDEPITSMGKELLLYPCGQEDHE

SEQ ID NO: 2487 - protein, 113 aa, Artificial Sequence
  Description of Artificial Sequence:  Synthetic peptide
NQTADSGLSSLGWYHANLSRHAAEALLLTNGQDGSYLLRNSNSKSNSYSLSVRARDSVKHFEVLQCGSYFKFGFNEFPTLKQFVEHFANQPLIGSESGTLILLKHPYPCTVEE

SEQ ID NO: 2488 - protein, 132 aa, Artificial Sequence
  Description of Artificial Sequence:  Synthetic peptide
VAPPLIVHNIQNGCHGPICTEYAINKLRQEGSEEGMYVLRWSCTDFDNILMTVTCFEKSEVSQEKSCPVRLFKNFQIEVQKGRYSLHGSDRSFPSLGDLMSHLKKQILRTDNISFVLKRCCQPKPREISNLL

SEQ ID NO: 2489 - protein, 108 aa, Artificial Sequence
  Description of Artificial Sequence:  Synthetic peptide
MADKVQVLPYFFGNITREDAEEYLRQGGSGDGLYLLRQSRSFLGGYALSVAYGRQFYHYTIEREMNDTYAIAGGKSHRTPIDVIDYHSQESDGLVCLLKRPFNRPRGT

SEQ ID NO: 2490 - protein, 136 aa, Artificial Sequence
  Description of Artificial Sequence:  Synthetic peptide
PCSLAAGASLLAWGELVGAKPVFPPLPSTAIAMLKDKEPGSFIVRDSHSFRGAYGLAMKVATPPPSVLQLNKKAGDLANELVRHFLIECTPKGVRLKGCSNEPYFGSLTALVCQHSITPLALPCKLLIPERDPLEE

SEQ ID NO: 2491 - protein, 110 aa, Artificial Sequence
  Description of Artificial Sequence:  Synthetic peptide
IAKTFSYLRESGWYWGSITASEAKQHLQKMPEGTFLVRDSTHPSYLFTLSVKTNRGPTNVRIEYADSKFRLDSNYLSKPRILAFPDVVSLIQHYVTSCTTESKSEAPYPP

SEQ ID NO: 2492 - protein, 120 aa, Artificial Sequence
  Description of Artificial Sequence:  Synthetic peptide
MKLREFNFYHGFLPREDLHSTLHNSGDYLIRVSEVVEGETKVNREVILSLIPIQSDGKEDTEKKNCRNVVIKRVGNKCFCEPTRTFESVTDLIKYYTDNSGSCSNGRFQLKNPILQQPWE

SEQ ID NO: 2493 - protein, 150 aa, Artificial Sequence
  Description of Artificial Sequence:  Synthetic peptide
IKRHLLSLWNDGSIMGFISKEREKALLSDKCPGTFLLRFSESSKEGAITFTWVEHDIHCECSASHNPVGLRTRLPWLLSAQKEKWLNVKGVPAHSLTDKPVFHSVEPYTKKELSAVSLPDIIRTYKVMAAENIPENPLRFLYPDIPKDKA

SEQ ID NO: 2494 - protein, 108 aa, Artificial Sequence
  Description of Artificial Sequence:  Synthetic peptide
MEKVSVYHGNISREMGEKLLSDAGKDGSYLLRDSETMPGMYCLCVLHKNLVYTYRVHQTSTGSWTAEAAPGVTRRLFRKVQNLISAYEKPNQGIATHLQHPVERTVTK

SEQ ID NO: 2495 - protein, 117 aa, Artificial Sequence
  Description of Artificial Sequence:  Synthetic peptide
YIAPVKSIDAEDWYFGKVGRKDAEKKLLAPGLQKGTFIVRDGEANPGTFSLSVRDYDPGKGEHIKHYRIRKLDNDSGYYITQRSQFQTLLELVHHYEGSADGLCCSLTNPCPKENPN

SEQ ID NO: 2496 - protein, 113 aa, Artificial Sequence
  Description of Artificial Sequence:  Synthetic peptide
SVLDRLSLTHPAWLLLTVSAEEATRILLQQPPGVFLVRKEAVVQKKVLSVRVEKVQSENAISHFPVRESQYTFSLEGSEISFADLFRLVAFYCISRDVLPFTLKLPEAIASAT

SEQ ID NO: 2497 - protein, 117 aa, Artificial Sequence
  Description of Artificial Sequence:  Synthetic peptide
TAPPSILEGIKNHCHGPITSEFAVNKLKKWGSEDGTFLLRQSPKTYGEFFLTVCLQTPLGLDYKDCLVIKNKHYSLPGVSKSFSSLKELTVYYQQNKLLLADVPVRLSRCCPPRSQE

SEQ ID NO: 2498 - protein, 121 aa, Artificial Sequence
  Description of Artificial Sequence:  Synthetic peptide
VAPPRLVTSIQNGIHGPLMDPFVQAKLWPEDGLYLIQWSTSHLHRLILTVAHRNPASRNGPRGLRLRKFPITQQPGAFVLDGWGRSFDSLGDLRQALQGCSLRAGDDCFPLHHCCLPRPRE

SEQ ID NO: 2499 - protein, 108 aa, Artificial Sequence
  Description of Artificial Sequence:  Synthetic peptide
MTSRRWFHPNITGIEAEHLLLTRGVHGSFLARPSKSNPGDFTLSVRRNDEVTHIKIQNSGDYYDLYGGEKFATLAELVQYYTEQHDLLRERNGDVIELKYPLNCKDPT

SEQ ID NO: 2500 - protein, 116 aa, Artificial Sequence
  Description of Artificial Sequence:  Synthetic peptide
YPLNCADPTSERWFHGHLSGREAEKLLTEKGKNGSFLVRESQSHPGDFVLSVRTGDDKTDTSDGKPKVTHVMIRCQHDLKYDVGGGEKFDSLTDLVEHYKKNPMVETLGTVLQLKQ

SEQ ID NO: 2501 - protein, 119 aa, Artificial Sequence
  Description of Artificial Sequence:  Synthetic peptide
TLPSTEQHLKEKWFHGKLAGGRVAAEKLLTDYKDVNGAFLVRESTTFTGDYSLSFVRDGKYNHCRIHTKSEGGKTRFYLIDQTLFDSIYELIMHYKSNPLKSPTFEQVLAEPVPQQNSH

SEQ ID NO: 2502 - protein, 108 aa, Artificial Sequence
  Description of Artificial Sequence:  Synthetic peptide
DAKMLEELNAEPWYQGEMSRKEAEALLQEDGDFLVRKSTTNPGSFVLTGMHNGQAKHLLLVDPEGTVRTKDRVFDSISHLITYHLESSLPIVSAGSELCLRQPVERKP

SEQ ID NO: 2503 - protein, 143 aa, Artificial Sequence
  Description of Artificial Sequence:  Synthetic peptide
DEELYKSLQAMPFYHGFLPRDDLGVIIRNEGDYLIRVTEITTRKDGNLGIKRDIVLSVCSSDRVGTEGDTKDAKSENPGERKMRNLVIRRYDGAYAIKGGHSFPTIEALLANHHVSNTSETKENRFLKTPIELQKWEYRHSAV

SEQ ID NO: 2504 - protein, 123 aa, Artificial Sequence
  Description of Artificial Sequence:  Synthetic peptide
CIVQDGSLLGQPWYSGNCDRQSVERALLHFQKDGAYTVRLSSGPHSSQPFTLAVLLRGRVFNIPIRQLDGGHHYALGREGRNHEEIFSSVTAMVQHYMKHPLPLVDRHSGSRGFTCLLFPTKP

SEQ ID NO: 2505 - protein, 136 aa, Artificial Sequence
  Description of Artificial Sequence:  Synthetic peptide
KESALENIQDHCWYHGRISRAESESLLSGCPIGSFLIRESDLYSGGLTLCVVGPSCMTDNTDATDHQSSTDVMTNVQHYRIVRRPFKPTRFDQCFEYPATPICSKIHYTLDETDWFSSLLELVQFYSQPKRGLVCA

SEQ ID NO: 2506 - protein, 107 aa, Artificial Sequence
  Description of Artificial Sequence:  Synthetic peptide
SGNGEIPMEQQPWYFGRISRERAEDLLLHGREGEFLVRDSESNPGDLSISMRGIERNKHFKVQNVDGLLKIGNRTFVDMNALINHYTTSPIFSSPTEKLFLTGPLPK

SEQ ID NO: 2507 - protein, 138 aa, Artificial Sequence
  Description of Artificial Sequence:  Synthetic peptide
LKLSSEEPRSHAWYHGAIPRQVAENLVQRDGDFLIRDSLSSPGNYVLTCQWKNSPQHFKINKRVVAMNEAYSRVQYLFEKEGFDSIPALVRYYVGNREPVSEVIGAIIFQPINRALPLRCLEEKYGVGSIRVEAGYLN

SEQ ID NO: 2508 - protein, 113 aa, Artificial Sequence
  Description of Artificial Sequence:  Synthetic peptide
QDYVNTEISEFLWYMGEMERAKAESTLKGTPNGTFLVRYSKNRKQTAISLSYKNDVKHMIIEQNSDGKVYLDEDYIFNSTVELVQYYRSNNLIEIFAALDTCLKNPYSQCKVF

SEQ ID NO: 2509 - protein, 101 aa, Artificial Sequence
  Description of Artificial Sequence:  Synthetic peptide
MKGWYHGKLDRTIAEERLRQAGKSGSYLIRESDRRPGSFVLSFLSQMNVVNHFRIIAMCGDYYIGGRRFSSLSDLIGYYSHVSCLLKGEKLLYPVAPPEPV

SEQ ID NO: 2510 - protein, 129 aa, Artificial Sequence
  Description of Artificial Sequence:  Synthetic peptide
ENVKFVQDTSKFWYKPDISREQAISVLKDKEPGSFIIRDSHSFRGAYGLAMKVATPPPTVLQTSRKVGDLSNELVRHFLIECTPKGVRLKGCPNEPYFGSLTALVCQHSITPLALPCRLIIPSRDPLEE

SEQ ID NO: 2511 - protein, 114 aa, Artificial Sequence
  Description of Artificial Sequence:  Synthetic peptide
AMSNMAIHRSQSWFHHKISRDEAQRLILQHGLVDGVFLVRDSQSNPKTFVLSLSHGLKIKHFQIVPLEDDGKLFYTLDDGQTRFTDLIQLVEFYQLNKGVLPCKLKHYCARIPL

SEQ ID NO: 2512 - protein, 121 aa, Artificial Sequence
  Description of Artificial Sequence:  Synthetic peptide
VMEVLKKHLKPHWNDGAILGFVNKQQAHDMLVNKRDGTFLLRFSDSEIGGITIAWKFELPDRALWNLMPFTARDFSVRSLADRLGDLNYLIYVYPDRPKDEVFSKYYTPVLCNPSKTDGYV

SEQ ID NO: 2513 - protein, 110 aa, Artificial Sequence
  Description of Artificial Sequence:  Synthetic peptide
SLLPVSFSACCRWFYGKIPRAKAEEILNKQRRDGAFLIRESESAPGDFSLSVKYGNDVQHFKVLRDGAGKYFLWVVKFTSLNELVEYHRTTSVSRNQQIFLRDIEQVTQV

SEQ ID NO: 2514 - protein, 108 aa, Artificial Sequence
  Description of Artificial Sequence:  Synthetic peptide
GPACTGRFAGKAWYYGGITRHQAECALNERGMEGDFVIRDSESSPSDFSISLKASGKNKHFKVQLVDSVYCIGQRRFKNLDELVEHYKKAPIFTSEHGEKLYLVKPLQ

SEQ ID NO: 2515 - protein, 111 aa, Artificial Sequence
  Description of Artificial Sequence:  Synthetic peptide
IKRHLLSLWNDGCILGFVSKEREKALLTGKCPGTFLLRFSESSRDGAITFTWVEHDQYNKPVFHAVEPYTKKELSAVSLPDIIRTYKVMAAENIPENPLRFLYPDIPKDKS

SEQ ID NO: 2516 - protein, 110 aa, Artificial Sequence
  Description of Artificial Sequence:  Synthetic peptide
QVGQLAQGGVPAWFHGAISREDAENLLELQPLGSFLIRVSHSHVGYTLSYKAQSCCRHFMVKLLDDGSFRIPGQEKTHASLDALVTFHQQQPVRPHGDLLTQPCGQEDPV

SEQ ID NO: 2517 - protein, 107 aa, Artificial Sequence
  Description of Artificial Sequence:  Synthetic peptide
MDLPYYHGRLTKQDCETLLLKEGVDGNFLLRDSESIPGVLCLCVSFKNIVYTYRIFREKHGYYRIQTAEGSPKQVFPSLKELISKFEKPNQGMVVHLLKPIKRTSPS

SEQ ID NO: 2518 - protein, 108 aa, Artificial Sequence
  Description of Artificial Sequence:  Synthetic peptide
DAKMLEELEGEPWYQGEMSRKEAEGLLKNDGDFLVRKSATNPGSFVLTGMHNGQAKHLLLVDPEGTIRTKDRVFDSISHLINHHLENSLPIVSAGSELCLQQPVEKTL

SEQ ID NO: 2519 - protein, 111 aa, Artificial Sequence
  Description of Artificial Sequence:  Synthetic peptide
YLAEDRSLQAEPWFFGAIKRTEAEKQLLYSGNQTGAFLIRESESQKGDFALSVLDERVVKHYRIRRMDEGEFFLSQKRTFPTLNEFVSHYTKTSDGLCVQLGKPCLKIQVP

SEQ ID NO: 2520 - protein, 111 aa, Artificial Sequence
  Description of Artificial Sequence:  Synthetic peptide
AGYQKASDTIAPWFHGILTLKRANELLSTCVPGSFLIRVSERIKGYALSYLSAEGCKHFLIDASTDSYSFLGADRLQHATLAALVDYHKEEPITSLGKELLLYPCGQQDEP

SEQ ID NO: 2521 - protein, 106 aa, Artificial Sequence
  Description of Artificial Sequence:  Synthetic peptide
IMDTVRQLEQSGFYWGPLGVEEAHRMLRNSALGSFLIRDSRQKDVLFTLSYHSVTGPVSVRIEYKDKQFSLAGSKQRFSSVLLLLDHYIGGPNNTLGIPYMKRVQT

SEQ ID NO: 2522 - protein, 108 aa, Artificial Sequence
  Description of Artificial Sequence:  Synthetic peptide
VEGEIDPNEGKVWFHGNVSKEEAAETLWKDGDIGGFLIRNSDKNPGDYSLSFRGPNTIQRFRIQKQQRQYVMGGRYYNSLDAIVDHYKKEEIIDGFKLRDPTAPKKFK

SEQ ID NO: 2523 - protein, 127 aa, Artificial Sequence
  Description of Artificial Sequence:  Synthetic peptide
VAPPRLLECLQSYCHGPLSMEFTLSKLRCYGNYQGLYILRCSPRDYDKYYMSFVVGHEGALDYKHCQIVKTEAGHFLLSGAKKSYGSIRDLLHCYRKEALRTDGYTFQLSRGCPPSPKDKSNLLVCR

SEQ ID NO: 2524 - protein, 129 aa, Artificial Sequence
  Description of Artificial Sequence:  Synthetic peptide
VAPASVVRNISNSCHGPISTEYAVHKLRQEGNEEGTYILRWSCTDFQYIVITVVCTELDLKESRPVRQYKNFQIEESSDGFRLYGTDTCRPTLMELLEHLESQSLRTDNLQFQLLRCCPPQPREISNLL

SEQ ID NO: 2525 - protein, 120 aa, Artificial Sequence
  Description of Artificial Sequence:  Synthetic peptide
VAPPRLVMSIRDGIHGPLLEPFVQAKLRPEDGLYLIHWSTSHPYRLILTVAQRSQAPDGMQSLRLRKFPIEQQDGAFVLEGWGRSFPSVRELGAALQGCLLRAGDDCFSLRRCCLPQPGE

SEQ ID NO: 2526 - protein, 109 aa, Artificial Sequence
  Description of Artificial Sequence:  Synthetic peptide
RIAEDDLNLPYFHGALMNQDADQLLVNEGDFMVTSRTVAELNKLQFHLAVRLKKGIRRYEIKRNSTSAKLGTRSAGNIGKLIDSLKAETIEIKGEKVALKRAIAKGKFQ

SEQ ID NO: 2527 - protein, 111 aa, Artificial Sequence
  Description of Artificial Sequence:  Synthetic peptide
REKIADEDRTLPYFHGALMNIDADQLLVNDGDFMVTTRIVADLNKLQFHLAVRLKKGIRRYEIKRNQNSAKLGNRSASNIGKLIDSLKAETIEIKGEKVILKRAIAKGKFQ

SEQ ID NO: 2528 - protein, 111 aa, Artificial Sequence
  Description of Artificial Sequence:  Synthetic peptide
KEKVPEEDLNLPYFHGALMNQDADQLLVNDGDFMVTMKLQIDINKLVVYLAVRLKKGIRRYEIKRLPGSAKLGSRSKETIDKLINSLKTDVLEIKGEKIVLKRAIAKGKFQ

SEQ ID NO: 2529 - protein, 139 aa, Artificial Sequence
  Description of Artificial Sequence:  Synthetic peptide
TNPYMSRLIFHPYFKNISYDQLAAMEPELEPGAIIIRPSRKGTDHLTVSWKIDDGIMQHIDVSEKEKSNNFSLGKLLIIGDEEFEDLDEIVARHVQPMVSLVRDVMTYKYYRDSSGGDRAHLNALLQHEKSFNPDRIPY

SEQ ID NO: 2530 - protein, 145 aa, Artificial Sequence
  Description of Artificial Sequence:  Synthetic peptide
AEQRVARVIKHPLFKDLNASQAEAYLSKMQVGDLVIRPSSKGSDHIVVTWKVAEGSYQHIDVLELEKENEFTIGQKLLVKGRFEKMTYQYSDLDELIVLHIKAIAKKIDEMCIHDKFRKGTQAETEKWLESYSEANPKRSCYAFC

SEQ ID NO: 2531 - protein, 129 aa, Artificial Sequence
  Description of Artificial Sequence:  Synthetic peptide
GSVGNSRVHNLKCYHGVRRRKKSRKNLMRGERPGTFLFRSCFVKSGVALALFLSVKVRAGDSDANIHHYQVEDRAGEYYLMQELMEKEELVTRESKAFPTLEELIGHFQHHRLACKIRLGRPLKRPSWQ

SEQ ID NO: 2532 - protein, 111 aa, Artificial Sequence
  Description of Artificial Sequence:  Synthetic peptide
RAKRTHRVINHPYYGNFTGPQAEDYLRSRERGDFVIRQSSRGDDHLAITWKLDKDLFQHVDILEKDKENPLALGKTLIVEDQKYHDLDQIIVEYLQNKVRLLNEITSNEKF

SEQ ID NO: 2533 - protein, 116 aa, Artificial Sequence
  Description of Artificial Sequence:  Synthetic peptide
FVAEDRSVNSEDWFFENVSRKEADKLLLANENPRGTFLVRPSEHNPNGFSLSVKDWEESRGYHVKHYKIKPLDNGGYYIATNQTFPSLPALVMAYSKNALGLCHVLSSPCPKPQPQ

SEQ ID NO: 2534 - protein, 101 aa, Artificial Sequence
  Description of Artificial Sequence:  Synthetic peptide
RIDPTVPLEKQIWYHGAISRTDAENLLRLCKECSYLVRNSQTSKHDYSLSLKSSQGFMHMKLTKTKEKYILGQNSPPFDSVPEVIHYYTTKKLPIKGAEHL

SEQ ID NO: 2535 - protein, 139 aa, Artificial Sequence
  Description of Artificial Sequence:  Synthetic peptide
RKTYARRVIAHPCFFNKSYAEVIAMLAEADQGEVAMRPSSKSAAHLTATWKVADDIYQHIDVREEGKENDYSLGRSLWIGTEEFEDLDEIIARYINPMACAARELIQYKYYKKNATPANGNEREFMEQLLRDEKAKDPK

SEQ ID NO: 2536 - protein, 120 aa, Artificial Sequence
  Description of Artificial Sequence:  Synthetic peptide
YIAHVKSIDAEDWYYGKVGRKDAEKKLLAPGLQKGTFIVRDGEANPGTFSLSVRDHDPGKGEHIKHYRIRKLDNDSGYYITQRSQFQTLLELVHHYERLWNGNTEVAVKTLRPKTMTPAA

SEQ ID NO: 2537 - protein, 110 aa, Artificial Sequence; identical to SEQ ID NO: 2359
  Description of Artificial Sequence:  Synthetic peptide

SEQ ID NO: 2538 - protein, 110 aa, Artificial Sequence
  Description of Artificial Sequence:  Synthetic peptide
MSFSADAERWYHGKITRENAAHLVSQGPITRREGLFLVRESTRTPGSYVLTLWAKGNVQQFQIMGHGEGWFSVDNGPLFQGLDELIHHYQLKPDGLPVQLNDYVIGNPPP

SEQ ID NO: 2539 - protein, 114 aa, Artificial Sequence
  Description of Artificial Sequence:  Synthetic peptide
SVLEKLVKTCPVWLQLGLGQAEAAKILQQEMAGMFLVCRDNNLKQLVLCVHFPSLKGSSAEVLEYPIKEEKAILYLEGSVLVFEDIFRLIAFYCVSRDLLPFTLRLPQAILEAS

SEQ ID NO: 2540 - protein, 117 aa, Artificial Sequence
  Description of Artificial Sequence:  Synthetic peptide
FVAKANSLEPEPWFFKNLSRKDAERQLLAPGNTHGSFLIRESESTAGSFSLSVRDFDQNQGEVVKHYKIRNLDNGGFYISPRITFPGLHELASAITPIASDGLCTRLSRPCQTQKPQ

SEQ ID NO: 2541 - protein, 111 aa, Artificial Sequence
  Description of Artificial Sequence:  Synthetic peptide
IKKHLLALWNDGCIVGFISKERERALLKDQQPGTFLLRFSESCREGAITFTWVERQEDPKPYFHAVEPYTKKELSAVTFPDIIRNYKVMAAENIPENPLKFLYPNIDKDHA

SEQ ID NO: 2542 - protein, 108 aa, Artificial Sequence
  Description of Artificial Sequence:  Synthetic peptide
RCRPSQQLQCEAWFHGGLSRKEAERLLTRDGDFLVRESGTTPGQYVLTGQQGGQPKHLLLVDPEGVVRTKDHRFESVSHLISYHMDNRLPIISAGSEVCLKQPVERRA

SEQ ID NO: 2543 - protein, 106 aa, Artificial Sequence
  Description of Artificial Sequence:  Synthetic peptide
ANGNSVPLQDAEWYWGDISREEVNEKLRDTPDGTFLVRDASSKIQGEYTLTLRKGGNNKLIKIFHREGKYGFSEPLTFGSVVELITHYRHESLAQYNAKLDTRLLY

SEQ ID NO: 2544 - protein, 107 aa, Artificial Sequence
  Description of Artificial Sequence:  Synthetic peptide
EGEGDASLSGYPWFHGTLSRVRAAQLVLAGGARSHGLFVIRQSETRPGEYVLTFNFQGKAKHLRLSVNDSGQCHVHHLWFQTVADMLRHFHTHPIPLESGGSTDITL

SEQ ID NO: 2545 - protein, 122 aa, Artificial Sequence
  Description of Artificial Sequence:  Synthetic peptide
YVAPVDSIQAEEWYFGKIGRKDAERQLLSPGNPQGAFLIRESETTKGAYSLSIRDWDQTRGDHVKHYKIRKLDMGGYYITTRVQFNSVQELVQHYMEVNDGLCNLLIAPCTIMKPQTLGLAK

SEQ ID NO: 2546 - protein, 122 aa, Artificial Sequence
  Description of Artificial Sequence:  Synthetic peptide
YVAPVDSIQAEEWYFGKIGRKDAERQLLSPGNARGAFLVRESETTKGAYSLSIRDWDEARGDHVKHYKIRKLDTGGYYITTRAQFNSVQELVQHYVEVNDGLCHLLTAACTTMKPQTMGLAK

SEQ ID NO: 2547 - protein, 116 aa, Artificial Sequence
  Description of Artificial Sequence:  Synthetic peptide
YVAKVNTLETEEWFFKDITRKDAERQLLAPGNGPGAFLIRESETLKGSYSLSIRDYDPQHGDVIKHYKIRSLDNGGFYISPRITFPSINDMIKHYQKQSDGLCRKLEKACISPKPQ

SEQ ID NO: 2548 - protein, 108 aa, Artificial Sequence
  Description of Artificial Sequence:  Synthetic peptide
KNYVDRQIPSWFKESASRGSAEETLMSREVGAFLIRGSQSSPGDFSISVRHDYDVQHFKVMKDKSGHYYLWTEKFTSLNKLVDFYKTTSISKQKEIFLRDGSGDEPRA

SEQ ID NO: 2549 - protein, 109 aa, Artificial Sequence
  Description of Artificial Sequence:  Synthetic peptide
SSHHSTAANHQPWFHSMISRENTEKLLRGKPDGTFLVRESTNFPGDFTLCMSFHGKVEHYRIEQTSGGQLTCDKEEYFSNLTQLVSHYKRDADGLCHRLVTPIICETAT

SEQ ID NO: 2550 - protein, 113 aa, Artificial Sequence
  Description of Artificial Sequence:  Synthetic peptide
QSSRETDYYVYPWFAGNMERQQADNLLKSHSSGTYLIRERTAEAERFAISIKFNDEVKHIKVIEKDNWIHITEAKKFESLLELVEYYQSHSLKESFKLLDTTLRYPYKSRERS

SEQ ID NO: 2551 - protein, 122 aa, Artificial Sequence
  Description of Artificial Sequence:  Synthetic peptide
FVAEERSVNSEDWFFENVLRKEADKLLLAEENPRGTFLVRPSEHNPNGYSLSVKDWEDGRGYHVKHYRIKPLDNGGYYIATNQTFPSLQALVMAYSKNALGLCHILSRPCPKPQPQMWDLGP

SEQ ID NO: 2552 - protein, 113 aa, Artificial Sequence
  Description of Artificial Sequence:  Synthetic peptide
PLVIRSDYSKYPWFAGNVERPQADNLLKGHVSGTYLIRERPAEAERFAISIKFNDEVKHIKVVEKNNWIHITEAKKFESLLELVEYYQMHSLKESFKQLDTTLKYPYKSRTGR

SEQ ID NO: 2553 - protein, 113 aa, Artificial Sequence; identical to SEQ ID NO: 2550
  Description of Artificial Sequence:  Synthetic peptide

SEQ ID NO: 2554 - protein, 132 aa, Artificial Sequence
  Description of Artificial Sequence:  Synthetic peptide
KSKHLQKHWDDGAIIGFIGKGDSQDKLVSKSLASFLLRYSDSEIGGLTIAWVADSDKAPGVPRVWNLQPQTLRDYGIRSLADRIKDLDQLMYIIKSDNTTQLKDEVFGQYYSKTISSSPQGDGYVRTELMQH

SEQ ID NO: 2555 - protein, 107 aa, Artificial Sequence
  Description of Artificial Sequence:  Synthetic peptide
MSYGWYHGNITRSKAEDLLSQAGKDGSYLVRDSESVCRAYALCVLNQNCVHTYRILQNAEHQLSVQASEGVPMRFFTNLVELIEFYRRENVGLVTHLQYPIEKEEEG

SEQ ID NO: 2556 - protein, 110 aa, Artificial Sequence
  Description of Artificial Sequence:  Synthetic peptide
AHWLLQHGAAPAWFHGFITRREAERLLESKPQGCYLVRFSESAVTFVLTYRSRTCCRHFLLAQLRDGRHVVLGEDSAHARLQDLLLHYTAHPLSPYGETLTEPLARQTPE

SEQ ID NO: 2557 - protein, 110 aa, Artificial Sequence
  Description of Artificial Sequence:  Synthetic peptide
QAHWLLLKTAPLWFHGFITRREAERLLQPQPLGCYLVRFSESAVTFVLSYRSQTCCRHFLLAQLGDGRHVVLGEDSAHAQLQDLLEHYTECPLSPYGEILTQPLARQTAE

SEQ ID NO: 2558 - protein, 115 aa, Artificial Sequence
  Description of Artificial Sequence:  Synthetic peptide
LPLIVHDGFFPKWFLGFITRKDAEEILREKELGCFLIRLSDKAIAYILSYKGKDRCRHFVINQSESGKFLVCGDTAGHDTLSELINYYRTKPIEPFGEHLTSSCVELPNEELYDI

SEQ ID NO: 2559 - protein, 120 aa, Artificial Sequence
  Description of Artificial Sequence:  Synthetic peptide
AHWLLQHGAAPAWFHGFITRRVRPPLSVTHREAERLLEPKPQGCYLVRFSESAVTFVLTYRSRTCCRHFLLAQLRDGRHVVLGEDSAHARLQDLLLHYTAHPLSPYGETLTEPLARQTPE

SEQ ID NO: 2560 - protein, 110 aa, Artificial Sequence
  Description of Artificial Sequence:  Synthetic peptide
SLSTNRPLYEEEWFHGVLPREEVVRLLNNDGDFLVRETIRNEESQIVLSVCWNGHKHFIVQTTGEGNFRFEGPPFASIQELIMHQYHSELPVTVKSGAILRRPVCRERWE

SEQ ID NO: 2561 - protein, 107 aa, Artificial Sequence
  Description of Artificial Sequence:  Synthetic peptide
TPEAHAGVEEEPWYHGEISRQEATGLLKKMGDFLVRYSADKEHYTLTVKMEGIKHFIIQHNEEGFRFEGDPYPSIPMLIDHHFKNRLPVTRKSQAILRQPVKKPDLR

SEQ ID NO: 2562 - protein, 110 aa, Artificial Sequence
  Description of Artificial Sequence:  Synthetic peptide
LGNGNGGLMEEEWFHGVLPREEVVRLLVTEGDFLVRETTRNDECQIVLSVCWDGHKHFIVQTTPEGHYRFEGPTFPSIQELIRHQWLSGLPVTSRSGAILKTPIIRERWE

SEQ ID NO: 2563 - protein, 131 aa, Artificial Sequence
  Description of Artificial Sequence:  Synthetic peptide
SGNGEIPMEQQPWYFGRISRERAEDLLLHGREGEFLVRDSESNKLQKLVEKLWDTKVVQTVAKPGDLSISMRGIERNKHFKVQNVDGLLKIGNRTFVDMNALINHYTTSPIFSSPTEKLFLTGPLPNNPFF

SEQ ID NO: 2564 - protein, 105 aa, Artificial Sequence
  Description of Artificial Sequence:  Synthetic peptide
AGLLKDTKEIAPWFHGIITRQQAEYLLFPKAEGHFLVRVSNRIWGYALSFRDKERAKHFLIDASGSMYSFFGQDQKDHASLEDLVQFHMGMDNCGEAAAPSPHKY

SEQ ID NO: 2565 - protein, 111 aa, Artificial Sequence
  Description of Artificial Sequence:  Synthetic peptide
RDIESFFPDMLSRKLGIISRQEAEELLMNKSEGTFLVRVSEKIWGYALSYRQQSGFKHFLVDASGDFYSFLGVDPNRHATLTDLIDFHKEEIITSSGGELLLEPCGQQKNP

SEQ ID NO: 2566 - protein, 102 aa, Artificial Sequence
  Description of Artificial Sequence:  Synthetic peptide
PATLDCVDGMCTEPQGIISREDAEALLENMTEGAFLVRVSEKIWGYTLSYRLQKGFKHFLVDASGDFYSFLGVDPNRHATLTDLVDFHKVSLTGILMGGRGN

SEQ ID NO: 2567 - protein, 111 aa, Artificial Sequence
  Description of Artificial Sequence:  Synthetic peptide
AGYQKNSDTIAPWFHGILTLKKANELLSTGMPGSFLIRVSEKIKGYALSYLSEEGCKHFLIDASANSYSFLGVDQLQHATLADLVEYHKEEPITSLGKELLLFPCGQQDKP

SEQ ID NO: 2568 - protein, 111 aa, Artificial Sequence
  Description of Artificial Sequence:  Synthetic peptide
AGYLADSDSIAPWFHGILTVNRANELLSTCVPGSFLIRVNEKVKGYTLSYQSEDGCKHFLIDASSDSYSFLGVDQLQHASLAELVEYHKEEPITSLGKELLLYPCGQQREP

SEQ ID NO: 2569 - protein, 117 aa, Artificial Sequence
  Description of Artificial Sequence:  Synthetic peptide
APTVTEDVVGKVWYHGNLSREDAQALLKTEGDFLVRQSDHTPGKYVLSGRTAENEHKHLILLDNHNRVRTRDRTFSNISELIDYHVNNGMAVRSEGRDRETSLNLIRPVPCPGSDDI

SEQ ID NO: 2570 - protein, 108 aa, Artificial Sequence
  Description of Artificial Sequence:  Synthetic peptide
MPVDPLSRRFYHGRITREEAEARLRNAGCHQGMFLLRESLGREGNYALSLCYEDDVYHYAIERQYDGTVAIKDGKNFAGPIELVSNHMNREDGLLCRLLRPCNLQQGI

SEQ ID NO: 2571 - protein, 118 aa, Artificial Sequence
  Description of Artificial Sequence:  Synthetic peptide
ESSPGGFTLSVRWYHGRLSGKEAEKLLLQKGHPGSFLVHMSQSDPGGFPLSALTQGWDEAQGSGRQPQVTHIMTHSQMLQQQECRFLYPRKEGQSVENKPKNHYKNILPFILLNEDDS

SEQ ID NO: 2572 - protein, 110 aa, Artificial Sequence
  Description of Artificial Sequence:  Synthetic peptide
PEPEPEPLPDRPWYFSGISRARAQQLLLSPANAPGAFLVRPSESSHGDYSLSVRAQAKVRHYRISAAADGLYLQKGRLFPSLEELLAYYAANWKLIRNPLLQPCVAQKLP

SEQ ID NO: 2573 - protein, 124 aa, Artificial Sequence
  Description of Artificial Sequence:  Synthetic peptide
GVKPEEMHVTEEWFHGRCERDEAKKRILEHKEKGNGLFMIRDSNLFIGDFSLSILHDGKVHHVRIRSKIVDKEKKYYFMDNKVCDTLYELVSYYTRHYLTTAHFKMVLTIACPQPQPHLNQPWF

SEQ ID NO: 2574 - protein, 129 aa, Artificial Sequence; identical to SEQ ID NO: 2234
  Description of Artificial Sequence:  Synthetic peptide

SEQ ID NO: 2575 - protein, 118 aa, Artificial Sequence
  Description of Artificial Sequence:  Synthetic peptide
DSVQFARSSSQFWYKPNLTREDAIALLASAQPGTFLVRDSTTYKDSYGLVVRVSQPPPGSQELVRHFLIEPTKGGVHLKGCDDEPVFTSLSALVFEHSISQLALPCLLRLPDRDIVPP

SEQ ID NO: 2576 - protein, 128 aa, Artificial Sequence
  Description of Artificial Sequence:  Synthetic peptide
LSSKFVQDSSKYWYKPGISRDQAIAVLKDKEAGCFLIRDSNSFQGAYGLALKVSTAPAHTNSHTEPGSAQEQLVRHFLIESGAKGVKIKGCQNETYFGSLSALVYQHSITPVSLPCVLRIPDRDLVGE

SEQ ID NO: 2577 - protein, 123 aa, Artificial Sequence
  Description of Artificial Sequence:  Synthetic peptide
INIKFVQDTSKYWYKPEITREQAICILKDREPGAFVIRDSNSFRGAYGLAMKVASPPPTVQQNKKVGDITNELVRHFLIETSAKGVRLKGCPNEPYFGCLSALVYQNAITPLLFHAVAKAITE

SEQ ID NO: 2578 - protein, 111 aa, Artificial Sequence
  Description of Artificial Sequence:  Synthetic peptide
VKKYILALWNEGYIMGFISKERERAILSPKPPGTFLLRFSESSKEGGITFTWVEKDINGKTQIQSVEPYTKQQLNSMSFAEIIMGYKIMDATNILVSPLVYLYPDIPKEEA

SEQ ID NO: 2579 - protein, 122 aa, Artificial Sequence
  Description of Artificial Sequence:  Synthetic peptide
YVAPSDSIQAEEWYFGKITRRESERLLLNPENPRGTFLVRKSETAKGAYCLSVSDFDNAKGPNVKHYKICKLYSGGFYITSRTQFGSLQQLVAYYSKHADGLCHRLTNVCPTSKPQTQGLAK

SEQ ID NO: 2580 - protein, 116 aa, Artificial Sequence
  Description of Artificial Sequence:  Synthetic peptide
YVARVNSLETEEWFFKGISRKDAERHLLAPGNMLGSFMIRDSETTKGSYSLSVRDFDPQHGDTVKHYKIRTLDSGGFYISPRSTFSSLQELVLHYKKGKDGLCQKLSVPCVSPKPQ

SEQ ID NO: 2581 - protein, 114 aa, Artificial Sequence
  Description of Artificial Sequence:  Synthetic peptide
KEAASGSLQEAEWYWGDISREEVNDKLRDMPDGTFLVRDASTKMQGDYTLTLRKGGNNKLIKIYHRDGKYGFSDPLTFNSVVELISHYRHESLAQYNTKLDVKLMYPVSRYQQL

SEQ ID NO: 2582 - protein, 116 aa, Artificial Sequence
  Description of Artificial Sequence:  Synthetic peptide
YVARVDSLETEEWFFKGISRKDAERQLLAPGNVLGSFMIRDSETTKGSYSLSVRDYDPQHRDSVKHYKIRTLDSGGFYISPRSTFNSLQELVAHYKKGSDGLCQKLTVPCMSSKPQ

SEQ ID NO: 2583 - protein, 128 aa, Artificial Sequence
  Description of Artificial Sequence:  Synthetic peptide
AKVKFVQDTSKYWYKPEISREQAIALLKDQEPGAFIIRDSHSFRGAYGLAMKVSSPPPTIMQQNKKGDMTHELVRHFLIETGPRGVKLKGCPNEPNFGSLSALVYQHSIIPLALPCKLVIPNRDPTDE

SEQ ID NO: 2584 - protein, 129 aa, Artificial Sequence
  Description of Artificial Sequence:  Synthetic peptide
VAPPLIVNNIKNGCHGPICTEYAINKLRQEGSDEGMYVLRWSCTDFNNILMTVACSKMSQYDSKCLKQYKNFQIEVKKGRYSLLGPDLEFDSLKDLMKHLKGQVLKTDDVSFTLKKCSPPKPREISNLL

SEQ ID NO: 2585 - protein, 116 aa, Artificial Sequence
  Description of Artificial Sequence:  Synthetic peptide
VMEVLKKHHKPHWNDGAILGFVNKQQAHDLLINKPDGTFLLRFSDSEIGGITIAWKFDSPDRNLWNLKPFTTRDFSIRSLADRLGDLSYLIYVFPDRPKDEVFSKYYTPVLAPASA

SEQ ID NO: 2586 - protein, 111 aa, Artificial Sequence
  Description of Artificial Sequence:  Synthetic peptide
IKRHLLSLWNDGSIMGFISKERKKALLSDKCPGTFLLRFSESSKEGAITFTWVEHDIHYKPVFHSVEPYTKKELSAVSLPDIIRTYKVMAAENIPENPLRFLYPDIPKDKA

SEQ ID NO: 2587 - protein, 113 aa, Artificial Sequence
  Description of Artificial Sequence:  Synthetic peptide
EDENLPHYDEKTWFVEDINRVQAEDLLYGKPDGAFLIRESSKKGCYACSVVADGEVKHCVIYSTARGYGFAEPYNLYSSLKELVLHYQQTSLVQHNDSLNVRLAYPVHAQMPS

SEQ ID NO: 2588 - protein, 157 aa, Artificial Sequence
  Description of Artificial Sequence:  Synthetic peptide
YPLNCQDPTSERWYHGHLTGKEAEKLLTEKGKPGSFLVRESQSKPGDFVLSVLTNEDKMETGDPQTSRDPRDDPLPGGQPACPRFACRAGPSWEPCALEPHRASVALLQPDGKYDVGGGERFDTLTDLVEHYKKNPMVEKSGAVVHLKQPFNATRIN

SEQ ID NO: 2589 - protein, 106 aa, Artificial Sequence
  Description of Artificial Sequence:  Synthetic peptide
PSIQRGPIEKEVYYHGFLPREDVKTVLKSNGEFLIRISEPRKGEQRSFILSVMHNNPPSPDEETWIKHFVIKYGENKYFIEKNAFMSVQELVDHHLKTRDSVKDEV

SEQ ID NO: 2590 - protein, 112 aa, Artificial Sequence
  Description of Artificial Sequence:  Synthetic peptide
CEVENRPKYYGREFHGMISREEADQLLSVAEGSYLIRESQRQPGTYTLALRFGSQTRNFRLYYDGKHFVGEKRFESIHDLVTDGLITLYIETKAAEYIAKMTINPIYEHIGY

SEQ ID NO: 2591 - protein, 109 aa, Artificial Sequence
  Description of Artificial Sequence:  Synthetic peptide
MSTDPAAELPFFYGSISRAEAEQHLKLAGMDDGLFLLRQCIRSLGGYVLSVVCSLEFHHYSIEKQLNGTFCIAGGKPHCGPAELCEFYSKDPDGLVCLLRKPCLRPADM

SEQ ID NO: 2592 - protein, 108 aa, Artificial Sequence
  Description of Artificial Sequence:  Synthetic peptide
MTEPAADLPFFYGSISRSEAEEHLKLAGMGGGLFLLRQCLRSLGGYVLSMIWNLDFYHYSIEKQLNGTYCIAGGKPHCGPAELCEYYSKDPDGLVCTLRKPCLRSPET

SEQ ID NO: 2593 - protein, 113 aa, Artificial Sequence
  Description of Artificial Sequence:  Synthetic peptide
DDEDLPHHDEKTWNVGSSNRNKAENLLRGKRDGTFLVRESSKQGCYACSVVVDGEVKHCVINKTATGYGFAEPYNLYSSLKELVLHYQHTSLVQHNDSLNVTLAYPVYAQQRR

SEQ ID NO: 2594 - protein, 110 aa, Artificial Sequence
  Description of Artificial Sequence:  Synthetic peptide
KLIATTAHERMPWYHGNIARDEAERRLYSGAQPDGKFLLRDKKENGAYALSLVYGKTVYHYRIDQDKSGKYSIPEGTKFDTLWQLVEYLKLKPDGLIFYLRESCPNPSMA

SEQ ID NO: 2595 - protein, 116 aa, Artificial Sequence
  Description of Artificial Sequence:  Synthetic peptide
YVARVNTLETEEWFFKDLTRKDAERQLLAPGNNPGAFLIRESETSKGSYSLSIRDCDPQTGDVIKHYKIRTLDNGGYYISPRITFTSINEMIQHYQKQADGLCRKLDKPCFSPKPQ

SEQ ID NO: 2596 - protein, 113 aa, Artificial Sequence
  Description of Artificial Sequence:  Synthetic peptide
PENYLKIEKSHPWYVGKISRKVAEEYLMSMPSDGAFMIRDSESNPDSGNFSLSVKFRDQVQHFKILTDLAGKYFLWVVKFTSINDLVDYHKDNSVSRTQEIVLNEPCVPIEDA

SEQ ID NO: 2597 - protein, 113 aa, Artificial Sequence
  Description of Artificial Sequence:  Synthetic peptide
VDPYEDELRMAPWYWGQITREEAKNILHGMPDGSFLVRDALSKKGEYTLTLMKDGNEKLIKICHINGMYGFIEKKLFNSVVDMVNFYKANSLNMYNKTLDIMLSHPIVRTYEE

SEQ ID NO: 2598 - protein, 123 aa, Artificial Sequence
  Description of Artificial Sequence:  Synthetic peptide
YPLNCKDPTSERWYHGHLSGRDAEKLLTEKGKSGSFLVRESQSKPGDFVLSVLTNEEKHENVDRKTKVTHVMIRYQDGKYDVGGGERFDTLADLVEHYKKNPMVEESGIVVHLKQPFNATRIN

SEQ ID NO: 2599 - protein, 157 aa, Artificial Sequence; identical to SEQ ID NO: 2588
  Description of Artificial Sequence:  Synthetic peptide

SEQ ID NO: 2600 - protein, 123 aa, Artificial Sequence
  Description of Artificial Sequence:  Synthetic peptide
YPLNCADPTSERWFHGHLSGKEAEKLLTEKGKHGSFLVRESQSHPGDFVLSVRTGDDKGESNDGKSKVTHVMIRCQELKYDVGGGERFDSLTDLVEHYKKNPMVETLGTVLQLKQPLNTTRIN

SEQ ID NO: 2601 - protein, 124 aa, Artificial Sequence
  Description of Artificial Sequence:  Synthetic peptide
YPLNCADPTSERWFHGHLSGREAEKLLTEKGKNGSFLVRESQSHPGDFVLSVRTGDDKTDTSDGKPKVTHVMIRCQHDLKYDVGGGEKFDSLTDLVEHYKKNPMVETLGTVLQLKQPLNTTRIN

SEQ ID NO: 2602 - protein, 110 aa, Artificial Sequence
  Description of Artificial Sequence:  Synthetic peptide
HRSAFSTGVIPDWFHGMIPRKAAEELLMTKPKGYFLIRASESRAGYTLSYRAEERCRHFMIDMMEDGSYVIVGEKRHHRFLQDLVDFHRRTPILPYTEVLTVACGKPVPK

SEQ ID NO: 2603 - protein, 111 aa, Artificial Sequence
  Description of Artificial Sequence:  Synthetic peptide
TPSSSVGFYDRDWFHGRITRQDSEKILGCPGESGLFLIRESETMPGDFAVSVKAPERVKHFKVTRSDKKFCIGQRKFESLDDLVDHYKRSPIFSSDDGELKLYLTRPNQRN

SEQ ID NO: 2604 - protein, 113 aa, Artificial Sequence; identical to SEQ ID NO: 2597
  Description of Artificial Sequence:  Synthetic peptide

SEQ ID NO: 2605 - protein, 111 aa, Artificial Sequence
  Description of Artificial Sequence:  Synthetic peptide
YVAEWKSLDAEEWFFGKVKRVDAEKQLMMPFNQYGSYLLRDSETTPGDFSLSIRDKERVRHYRIKRLENGTFFVTRRVTFETIRDLVAYYQQQADGLCVNLMYPCSLSEKP

SEQ ID NO: 2606 - protein, 111 aa, Artificial Sequence
  Description of Artificial Sequence:  Synthetic peptide
YVAEYKSLDAEAWFLGQIKRIEAERLLNQPVNKVESFLIRDSESNPGDFSLSVKDQDRVRHYRVHRLEDGSLFVTNGVMFQSLHDLVEHYKTQKDGLCCNLLCPCLQTEKP

SEQ ID NO: 2607 - protein, 121 aa, Artificial Sequence
  Description of Artificial Sequence:  Synthetic peptide
PVTMSRPQTPSRLKSGTLGRSLVGSSERPAAQTPKTPGNLLGSGRARRQKVPIASPVSDFDNAKGLNVKHYKIRKLDSGGFYITSRTQLQKACRQLVAYYSKHADGLCHRLTNVCPTSKPQ

SEQ ID NO: 2608 - protein, 112 aa, Artificial Sequence
  Description of Artificial Sequence:  Synthetic peptide
EIDLEVHSDEKTWLYLECSRSDADRILADRPDGTFLIRTSRTGQYALSIMCNGTVNHCIIYGTERGFGFAEPYNIHKSLKHLVLHYAQNSLEEHNESLNTTLAYPAFASPAA

SEQ ID NO: 2609 - protein, 107 aa, Artificial Sequence
  Description of Artificial Sequence:  Synthetic peptide
PVPQPKKHEDQDWFHPNTTKEQAEQGLFKLDIGSFLVRPSVQSINAFVISFTINRKIKHCRIIQEGRLYAIDTMQFESLVSLIHYYTRNPLYRNVKLCHPVSQDLLR

SEQ ID NO: 2610 - protein, 111 aa, Artificial Sequence
  Description of Artificial Sequence:  Synthetic peptide
PPSREIDYTAYPWFAGNMERQQTDNLLKSHASGTYLIRERPAEAERFAISIKFNDEVKHIKVVEKDSWIHITEAKKFESLLSILSAIFGSPAPEGEVFEALAILAGLGWRA

SEQ ID NO: 2611 - protein, 110 aa, Artificial Sequence
  Description of Artificial Sequence:  Synthetic peptide
YVVGNILHRQQPWFHGVIPRTEAERRLKSLSETGMFLIRERGSPRGSYVIGLFYQGGVYHYLFESNNQGQLSIKSGRSFDNLMAVVNFYSQKSEGLFCTLKRACEVSWFE

SEQ ID NO: 2612 - protein, 106 aa, Artificial Sequence
  Description of Artificial Sequence:  Synthetic peptide
DEDSTVFDIKYSILCSTITDMQTTALEMPDRENTFVVRVEGPSEYTLETANALHGKAKHLRLSLSEEGQCRVQHLWLQSIFDVLEHFRVHPIPLELQAPVTLFLSA

SEQ ID NO: 2613 - protein, 106 aa, Artificial Sequence
  Description of Artificial Sequence:  Synthetic peptide
MVRWFHPNISGIEAEKLLLTRGVHGSFLARPSKSNPGDFTLSVRRNDEVTHIKIQNTGDYYDLYGGEKFARKPELVQYYTEQQGLLREKNSNVIELKYPLNCQDPT

SEQ ID NO: 2614 - protein, 114 aa, Artificial Sequence
  Description of Artificial Sequence:  Synthetic peptide
ILDLIKKHLLPVWIDGCIMGFVSKEMERALLKEKEPGTFLLRFSESHLGGITFTWVEQDENGDPKFISVEPYTKNRLNALPIADIIRDYKVIADGVVPENPLNFLYPDIPKDEA

SEQ ID NO: 2615 - protein, 111 aa, Artificial Sequence
  Description of Artificial Sequence:  Synthetic peptide
YVAKLKSIEAEPWYFRKIKRIEAEKKLLLPENEHGAFLIRDSESRHNDYSLSVRDGDTVKHYRIRQLDEGGFFIARRTTFRTLQELVEHYSKDSDGLCVNLCKPCVQIEKP

SEQ ID NO: 2616 - protein, 111 aa, Artificial Sequence
  Description of Artificial Sequence:  Synthetic peptide
YVAEDRSLQAEPWFFGAIKRADAEKQLLYSENQTGAFLIRESESQKGDFSLSVLDEGVVKHYRIRRLDEGGFFLTRRKVFSTLNEFVNYYTTTSDGLCVKLEKPCLKIQVP

SEQ ID NO: 2617 - protein, 110 aa, Artificial Sequence; identical to SEQ ID NO: 2560
  Description of Artificial Sequence:  Synthetic peptide

SEQ ID NO: 2618 - protein, 113 aa, Artificial Sequence; identical to SEQ ID NO: 2427
  Description of Artificial Sequence:  Synthetic peptide

SEQ ID NO: 2619 - protein, 120 aa, Artificial Sequence
  Description of Artificial Sequence:  Synthetic peptide
TSANDELHFGENWFHGKLEGGRKEADDLLKKYKHFGDGTFLVRESATFVGDYSLSFWRRNRPNHCRIKLKHENGSIKYYLVENFVFDSLYSLIVYYRKNMLRSSEFSIILKEPVPQPKKH

SEQ ID NO: 2620 - protein, 102 aa, Artificial Sequence
  Description of Artificial Sequence:  Synthetic peptide
AEIVPDAPWYFGEISREKANEILIDQPVGTFLIRDSTTKSGYVLAIKEANEVKRYLLTWSPQLKKFKFGETLYSSLDELVRLHTSHSSSTRMRQPAQKATYA

SEQ ID NO: 2621 - protein, 107 aa, Artificial Sequence
  Description of Artificial Sequence:  Synthetic peptide
VELEPFYYDIDRRYCELLLRDRPAGTCIVRPFKLKHETIRYILSIRAPDTYFHLFIRHAGKNGMYALGLEKEQEKRFKFPTDIVRYYQAHLLECSRASRVCTKLQLQ

SEQ ID NO: 2622 - protein, 117 aa, Artificial Sequence
  Description of Artificial Sequence:  Synthetic peptide
MSAYVSELIDFKYYKPNIEGIKDKAEEILKEQKKQNPGGIPYIVSAAKNYPGKFLLSYLPRTRCRHEYITVSPDGFRFRGQMFSRLSDLFRWFKEHFRDPIPGQSTPGTPHGAMTSR

SEQ ID NO: 2623 - protein, 114 aa, Artificial Sequence
  Description of Artificial Sequence:  Synthetic peptide
ANGNSVPLQDAEWYWGDISREEVNEKLRDTPDGTFLVRDASSKIQGEYTLTLRKGGNNKLIKIFHREGKYGFSEPLTFGSVVELITHYRHESLAQYNAKLDTRLLYPISKYQQD

SEQ ID NO: 2624 - protein, 111 aa, Artificial Sequence
  Description of Artificial Sequence:  Synthetic peptide
IRKHLQPVWTADYIMGFVSKEMERNLLKDREPGTFLLRFSESHLGGITFTWVEHKDNAGEVKFNSVEPYTKNRLSALPFVDIIRDYKVISDGVVPENPLKFLYPDIPKDEA

SEQ ID NO: 2625 - protein, 111 aa, Artificial Sequence
  Description of Artificial Sequence:  Synthetic peptide
YVAEDRSLQAEPWFFGAIGRSDAEKQLLYSENKTGSFLIRESESQKGEFSLSVLDGAVVKHYRIKRLDEGGFFLTRRRIFSTLNEFVSHYTKTSDGLCVKLGKPCLKIQVP

SEQ ID NO: 2626 - protein, 115 aa, Artificial Sequence
  Description of Artificial Sequence:  Synthetic peptide
GPGGALGSPAPAWYHRDLSRAAAEELLARAGRDGSFLVRDSESVAGAFALCVLYQKHVHTYRILPDGEDFLAVQTSQGVPVRRFQTLGELIGLYAQPNQGLVCALLLPVEREREP

SEQ ID NO: 2627 - protein, 110 aa, Artificial Sequence
  Description of Artificial Sequence:  Synthetic peptide
TLSTNRPLHEEEWFHGVLPREEVVRLLRNEGDFLVRETTRNDESQTVLSVCWNGHKHFIVQTTAEGHYRFEGPAFPSIQELIVHQYQSELPVTGRSGAVLRKPVLRERWE

SEQ ID NO: 2628 - protein, 111 aa, Artificial Sequence
  Description of Artificial Sequence:  Synthetic peptide
AGFERNTKSIAPWFHGIISREDAEDLLENMTEGAFLVRVSEKIWGYTLSYRLQKGFKHFLVDASGDFYSFLGVDPNRHATLTDLIDFHKEEIITVSGGELLQEPCGQRDSP

SEQ ID NO: 2629 - protein, 108 aa, Artificial Sequence
  Description of Artificial Sequence:  Synthetic peptide
RVDPSLPLQEQSWYHGCVTRQEAELQLQSCREASFLVRNSESDSSKYSIALKTSHGCVHIIVAQTKGNGYTLDQSSCVFPSIPEVVHHYCSQRLPFTGAEHMTLLHPV

SEQ ID NO: 2630 - protein, 112 aa, Artificial Sequence
  Description of Artificial Sequence:  Synthetic peptide
IVDPTLPLEKQSWYHGSVSRQEAEAQLQQCREASFLVRDSESATSKYSIALKTSQGCVHIIVAQTKECGYTLEKSSCVFPSIPEVVHHYCTQRLPFTGAEHMTLQHPVPRTH

SEQ ID NO: 2631 - protein, 112 aa, Artificial Sequence
  Description of Artificial Sequence:  Synthetic peptide
TPGAMSSFPLFSWYHGSISRAEAESRLQPCKEAGYLVRNSESGNSKYSIALKTSQGCVHIIVAQTKDSRYTLNQTSAVFDSIPEVVHYYSTAKLPFKGAEHMTLLHPVHKLH

SEQ ID NO: 2632 - protein, 128 aa, Artificial Sequence
  Description of Artificial Sequence:  Synthetic peptide
ITGTTPPAIEDSQRKHCLRRACTINMLKDQDPGAFVIRDSHSFRGAYGLAMKVASPPPTTQPTKKAGDVTNELVRHFLIETSPKGVRLKGCPNEPYFGCLSALVYQHSITPLALPCKLVIPTRDPLEE

SEQ ID NO: 2633 - protein, 111 aa, Artificial Sequence
  Description of Artificial Sequence:  Synthetic peptide
VGREEDPHEGKIWYHRKISKQEAYNLLLTVGQVCSFLVRPSDNTPGDYSLFFRTNENIQRFKISPTPNNQYMMGGRYYNSMVVMFQAELGMSYGNPSLLFLDSNKPVLGSK

SEQ ID NO: 2634 - protein, 111 aa, Artificial Sequence
  Description of Artificial Sequence:  Synthetic peptide
IMDTVREILSQKWFHGDLDTTEAASRLNGQPIGSFLIRFSSTNAGCFTISQVVDGGSIKHQRVSRQGVKFNYQNVIYNSLIEIVSKNGGGANGDVKLDSQLGVPNYKFMSL

SEQ ID NO: 2635 - protein, 125 aa, Artificial Sequence
  Description of Artificial Sequence:  Synthetic peptide
NTEEDEDSLNDEWYVAYISRPEAEAALRKINKDGTFLVRDSSRKTTTHPYVLMVLYKDKVYNIQIRYQEQDQTYLLGTGLKGKEDFSSVAHIIDYFQRTPLLLIDGKDRGSRNQCVLKYAAGNIK

SEQ ID NO: 2636 - protein, 101 aa, Artificial Sequence
  Description of Artificial Sequence:  Synthetic peptide
RPVPNKPRHFGTEFHGLIDRNEAERMLLEVGEGSYLVRESIRSRDACTLCMVFDGKVMNYKLYYDGQFYVGEKRFDTMDLLVADGLISMFVDLHAADYIKR

SEQ ID NO: 2637 - protein, 146 aa, Artificial Sequence
  Description of Artificial Sequence:  Synthetic peptide
FSILEKKLREFNFYHGFFPREDLQTTLHNLGDFLLRVSEVVEGEHKVNREVILSLIPVSTVSRDEEEKKKVRRLIQANAPACCLYFLTYLAPRNVVIKRVRNLFFCEPPRTFESISDLLNYYTKNHGGCASGTFQLKHPILQQSWE

SEQ ID NO: 2638 - protein, 111 aa, Artificial Sequence
  Description of Artificial Sequence:  Synthetic peptide
TDMGGRQDMDPAWYLGQITRGEAESCLRRVNRDGTFLVRDSSNRSSNQPYTLVVLYQDKVYNIQIRRNQDRFMLGTGMKASESFERVSDIVNQHKHTPLLLIDAKNRESGQ

SEQ ID NO: 2639 - protein, 109 aa, Artificial Sequence
  Description of Artificial Sequence:  Synthetic peptide
SLRERLLITRPVWLQLRANAAAALHVLRTEPPGTFLVRKSNTRQCQTLCVRLPEASGPSFVSSHYLQESPGGISLEGSELTFPDLVQLICAYCHTRDILLLPLPLPRAI

SEQ ID NO: 2640 - protein, 121 aa, Artificial Sequence
  Description of Artificial Sequence:  Synthetic peptide
QTTEKESLSQDQWYTGNISRSEAETALRSINQDGTFLVRNSSKSTASHPYVLMVLYRNKVYNIQIRQDQTNNVYMLGSGLRGQETFASVMEIIDYFHKTPLLLIDGKDQSLRQHCVLTVSA

SEQ ID NO: 2641 - protein, 110 aa, Artificial Sequence
  Description of Artificial Sequence:  Synthetic peptide
IKKHLLCLWNDGCIVGFISKERERALLKEKAPGTFLLRFSESSREGAITFTWVERPQNEPLFHSVEPYTKKELSAVTFPDIIRNYKVMAAENIPENPLRFLYPDTPKDMA

SEQ ID NO: 2642 - protein, 108 aa, Artificial Sequence
  Description of Artificial Sequence:  Synthetic peptide
KKREGVKLQTMPWFHGKITREQAEDLLQPREDGLFLVRESTNYPGDYTLCVAFLTKVEHYRVIYEKNKLTIDSEEFFENLTKLVEHYQSEADGLCARLTKSIPKKGGQ

SEQ ID NO: 2643 - protein, 107 aa, Artificial Sequence
  Description of Artificial Sequence:  Synthetic peptide
IPASHVAKVYHGWLFEGVERQKAEELLSLPGNRVGSFMVRESTRERGSYSLSVKYRSVKHYRIYRLDNSWYYISPSLTFQCLEDMINHYCDGLCCALTSPCLSASLP

SEQ ID NO: 2644 - protein, 111 aa, Artificial Sequence
  Description of Artificial Sequence:  Synthetic peptide
AKASPETLSDQPWYFSGVSRTQAQQLLLSPPNEPGAFLIRPSESSLGGYSLSVRAQAKVCHYRVSMAADGSLYLQKGRLFPGLEELLTYYKANWKLIQNPLLQPCMPQKAP

SEQ ID NO: 2645 - protein, 112 aa, Artificial Sequence
  Description of Artificial Sequence:  Synthetic peptide
SGCSGALLDDEPFYHGYMSREESEKLVRSQGEFLLRKTELTKRGEVVVLSVFWDEGVHHLVVEKANNGLYYLKEFCFENISDLVRYHHQTRASVYKSGIKLFSWVVREEWQL

SEQ ID NO: 2646 - protein, 109 aa, Artificial Sequence
  Description of Artificial Sequence:  Synthetic peptide
YITPVNSLEKHSWYHGPVSRSAAEYLLSSLINGSFLVRESESSPGQLSISLRYEGRVYHYRINTTADGKVYVTAESRFSTLAELVHHHSTVADGLVTTLHYPAPKCNKP

SEQ ID NO: 2647 - protein, 108 aa, Artificial Sequence
  Description of Artificial Sequence:  Synthetic peptide
VPDVEKPLTQQVWYHGAIPRMEVQELLKNDGDFLVRESQGKQEYVLSVHWGGQCRHFLIQSTDGVYRLDGEGFISVPLLVNHLFNSHQTVTKRTEIVLKKPIPKDKWV

SEQ ID NO: 2648 - protein, 123 aa, Artificial Sequence
  Description of Artificial Sequence:  Synthetic peptide
SVAENGSLLGQPWYSGNCDRQSVERALLHFQKDGAYTVRLSSGPHSSQPFTLAVLLRGRVFNIPIRQLDGGHHYALGREGRNHEELFSSVAAMVQHYTKHPLPLVDGHSGNRGLTYLRFPTKP

SEQ ID NO: 2649 - protein, 123 aa, Artificial Sequence
  Description of Artificial Sequence:  Synthetic peptide
LSEQEADIHCKPWYAGACDRKSAEEALYRSNKDGSFLIRKSSGHDSKQPYTLVVFFNKRVYNIPVRFIEATKQYALGRKKNGEEYFGSVAEIIKNHQYSPLVLIDSQNNTKDSTRLKYAVKVS

SEQ ID NO: 2650 - protein, 108 aa, Artificial Sequence
  Description of Artificial Sequence:  Synthetic peptide
MTSRRWFHPNISGQEAETLLLTNGGHGSFLARPSKSNPGDFTLSVRRHNEVTHIKIQNTGDYYDLYGGETFATLAELVQYYTEQQGLLREKNGDVIELKYPLNSQDPT

SEQ ID NO: 2651 - protein, 111 aa, Artificial Sequence
  Description of Artificial Sequence:  Synthetic peptide
MAATFDQYDKSSWYFGAMSRQDASDLLMGEKEGGVFLVRDSTSIQGDFVLCVREDSKVSHYIINKIQQGDQIRYRIGDQTFPDIPNLLAFYKLHYLDTTPLIRPAPKRTQR

SEQ ID NO: 2652 - protein, 110 aa, Artificial Sequence
  Description of Artificial Sequence:  Synthetic peptide
VHDHLKDLWKDGRIMGFVSRNQERRLLKKMLSGTFLLRFSETSEGGITCSWVEHQDDHKVEIYSVQPYTKEVLQSLPLTEIIRHYQVLAEENIPENPLRFLYPRIPRDEA

SEQ ID NO: 2653 - protein, 106 aa, Artificial Sequence
  Description of Artificial Sequence:  Synthetic peptide
VMKVTREHLRQQWNDGSIMGFVGRRQAKEMLKNSKSGTFLLRFSDSELGGVTIAWMYEDTTKACQRDVFMLQPFTSKAFAIRPLADVIADLNYLLYLYPNVPKDQA

SEQ ID NO: 2654 - protein, 88 aa, Artificial Sequence
  Description of Artificial Sequence:  Synthetic peptide
RVDPTIPLEKQIWYHGAISRSDAENLLRLCKECSYLVRNSQTSKHDYSLSLNYADPEAVCAMPILPRTARPSVRPSVHPSVRKICARR

SEQ ID NO: 2655 - protein, 111 aa, Artificial Sequence
  Description of Artificial Sequence:  Synthetic peptide
SHLEKLPLEEQPWFHPSLTRSEAEELIRNEPEGSFLVRPSETCPNDFSLTIKHKTFLHMKITRNNAGQFILGEYSQPYSSVSQMIYHYARTLVPVLGAYSVTLTHPVFKRV

SEQ ID NO: 2656 - protein, 109 aa, Artificial Sequence
  Description of Artificial Sequence:  Synthetic peptide
ERPAIIAPPESEWYHGRLDRYSAESRLRGSSKLGSYLVRESDRKPGSYVLSYYGRTGINHFRITAVCGDFYIGGRQFISLSDLVGYYTSCSDLLKRERLAIPVAPPEPV

SEQ ID NO: 2657 - protein, 120 aa, Artificial Sequence
  Description of Artificial Sequence:  Synthetic peptide
LVPDQWNIMKAPYYWGKIDRYEADMLLDDKPEGTFLLRDSAQEEFLFSVSFCRYGRTLHARIEQWNHKFSFDAHDPGVYSSDTICSLLEHYKDPNYCMFFEPMLTSPLPRANPSSLMELS

SEQ ID NO: 2658 - protein, 116 aa, Artificial Sequence
  Description of Artificial Sequence:  Synthetic peptide
FVAKANSLEPEPWFFKTLSRKDAERQLLAPGNTHGSFLIRESESTAGSFSLSVRDFDQTQGEVVKHYKIRNLDKGGFYISPRVTFPGLHELVRHYMNTSDGLCTRLSRPCQTQKPQ

SEQ ID NO: 2659 - protein, 108 aa, Artificial Sequence
  Description of Artificial Sequence:  Synthetic peptide
GRHGIPPWFHGIPPWRSSRIIKQQGLVDGLFLLRDSQSNPKAFVLTLCHHQKIKNFQILPCEDDGQTFFSLDDGNTKFSDLIQLVDFYQLNKGVLPCKLKHHCIRVAL

SEQ ID NO: 2660 - protein, 115 aa, Artificial Sequence
  Description of Artificial Sequence:  Synthetic peptide
FVARVETLEVEKWFFRSICRRDAERQLLAPVNKAGAFLIRESETSKGAFSLSVKDVTTQGEVIKHYKIRSLDEGGYYISPRSAFPTLQALVQHYSKKGDGLCQRLTHPCVSLAPQ

SEQ ID NO: 2661 - protein, 115 aa, Artificial Sequence
  Description of Artificial Sequence:  Synthetic peptide
VTEAEDSIEMYEWYSKHMTRSQAEQLLKQEGKEGGFIVRDSSKAGKYTVSVFAKSTGDPQGVIRHYVVCSTPQSQYYLAEKHLFSTIPELINYHQHNSAGLISRLKYPVSQQNKN

SEQ ID NO: 2662 - protein, 113 aa, Artificial Sequence
  Description of Artificial Sequence:  Synthetic peptide
DPGDRPHLVGKPWYYGSISRSQCDTLLNQHGHDGDFLIRDSETNVGDYSVSLKAPGRNKHFRVHVEGALYCIGQRKFHTLDQLVDHYQRAPIYTNKQGEKLYLVRPLPKGNPS

SEQ ID NO: 2663 - protein, 118 aa, Artificial Sequence
  Description of Artificial Sequence:  Synthetic peptide
FVAKQQTIESEEWYAGKIPRNRAERLVLSSHLPKGTFLIREREADTREFALTIRDTDDQRNGGTVKHYKIKRLDHDQGYFITTRRTFRSLQELVRYYSDVPDGLCCQLTFPAPRLAPT

SEQ ID NO: 2664 - protein, 110 aa, Artificial Sequence
  Description of Artificial Sequence:  Synthetic peptide
IPAKCVAKVYHGWLFEGVGREKSEELLQLPDSKNGSFMIRQSETEKGSYSLSVKHRQVKHYRIFRLPNNWFYISPRLTFQCLEHLVNHYSENADGLCCVLTSPCLTQQSI

SEQ ID NO: 2665 - protein, 113 aa, Artificial Sequence
  Description of Artificial Sequence:  Synthetic peptide
LIDVTIPLERQGWYHGAITRIEAETTLRPLSEGSFLVRNCESTKQDYSLSLKGAKGFMHMRIQRNETGQYILGQFSRPFETVPEMIRHFCLNRLPVRGAEHMCLIEPVIAQLL

SEQ ID NO: 2666 - protein, 126 aa, Artificial Sequence
  Description of Artificial Sequence:  Synthetic peptide
  MOD_RES (63)..(96): x = any natural occuring amino acid
VSANIELHLAQDWFHGKLEAGHGGRHIAERLLTEYCTEMGAPDGSFLVRESETFVGDYVLSIXCDEKVQHFRIHWWQDTNIHRFFLTDNLVFDSLXDLITHYRETPMRYNGLEMRLTESVPRSNTR

SEQ ID NO: 2667 - protein, 115 aa, Artificial Sequence
  Description of Artificial Sequence:  Synthetic peptide
DASVTDDIRGAEYYHGMVPRQDAEGFLKREGDFLVRKTEQTPGKVVLALSVRVNDELCRHFMLNMDPATNKFYFEFTHQESTIPDLINWHMTTKTPISAASGAKIRRPMERSPWL

SEQ ID NO: 2668 - protein, 125 aa, Artificial Sequence
  Description of Artificial Sequence:  Synthetic peptide
QFVKFARDSSKYWYKPNISREEAIALLRNAAPGTFIVRDSTTFANAYGLVVKVNHPPPGVQYTGPNSEELVRHFLVEPTIRGVRLKGCANEPVFTSLSALVYQHSITPLALPCRLIIPDMDLQQM

SEQ ID NO: 2669 - protein, 123 aa, Artificial Sequence
  Description of Artificial Sequence:  Synthetic peptide
SPEEEAGVLNKDWYAASCDRKTAEEALYASCKDGSYLVRQSSGQDPKQPYTLVVFYNRKVYNIPVRFIEETRQFALGREKSGEEKFSSVAEMITCHQRMPLVLIDSQNNTKDSTKLKQVIKVP

SEQ ID NO: 2670 - protein, 109 aa, Artificial Sequence
  Description of Artificial Sequence:  Synthetic peptide
DDYISNILKHHLWYHGMMFGGTVEKLLKWEHSYLVRRAIQRSSMKKTLCISVKIDGKVLNFQLTWNEDGWGSTKLVAKFPKMAQKRYAHIYQLLDAWSLSVNAITPVPR

SEQ ID NO: 2671 - protein, 124 aa, Artificial Sequence
  Description of Artificial Sequence:  Synthetic peptide
VAPPRLLEEEAELCHGPITLDFAIHKLKAAGSLPGSYILRRSPQDYDSFLLTACVQTPLGPDYKGCLIRQDPSGAFSLVGLSQLHRSLQELLTACWHSGLQVDGTALNLTSCCVPRPKEKSNLI

SEQ ID NO: 2672 - protein, 113 aa, Artificial Sequence; identical to SEQ ID NO: 1964
  Description of Artificial Sequence:  Synthetic peptide

SEQ ID NO: 2673 - protein, 110 aa, Artificial Sequence
  Description of Artificial Sequence:  Synthetic peptide
KLIATTAHEKMPWFHGRISREDSEQLLISGVKPNGSFLIRERDNNGSYALCLLHDRKISHYRIDRDKTGKLSIPDGKKFDTLWQLVEHYSYKPDGLLRVLTEPCPRATGC

SEQ ID NO: 2674 - protein, 113 aa, Artificial Sequence
  Description of Artificial Sequence:  Synthetic peptide
RPSLSWKSAGNPWYYGKVTRHQAEMVLNERGHEGDILICDSESSPNDFSGSLKTQGENKHFKVQLKETVYCIGQQKFSTMEELVEHYKQAPIFTMNKEKNYILSSVCLDSARQ

SEQ ID NO: 2675 - protein, 118 aa, Artificial Sequence; identical to SEQ ID NO: 2439
  Description of Artificial Sequence:  Synthetic peptide

SEQ ID NO: 2676 - protein, 110 aa, Artificial Sequence
  Description of Artificial Sequence:  Synthetic peptide
YLAEKETVESEPWFFGRISRSEALHRLQAMGNEQGSFLIRISEKPGADYVLSVRDQQTVRHYKIWWRAGRLHLNEAVSFPGLSELVDHHKVQSLSHGLRLTSPCRKHEPE

SEQ ID NO: 2677 - protein, 110 aa, Artificial Sequence
  Description of Artificial Sequence:  Synthetic peptide
IAPPTNPLYNEEWFHGPMSRKEGEPLLSNDGDFLVRESTTAKDQYVLSGMQNGTPKHLLLVDPQGKVRTKDKEFDSVSHLINYHRNNRLPIISAGSAVHLKTPVVRKFKT

SEQ ID NO: 2678 - protein, 111 aa, Artificial Sequence
  Description of Artificial Sequence:  Synthetic peptide
IKRHLLNIWNDGYIVGFLSRKQEKAMLRDKAPGTFLLRFSESCRDGGITFTWVEESQDGEPKIHSVKPYTKADLATISMPNIIRDYTLAAPMKVPVYPLIYLYPNIPKDEA

SEQ ID NO: 2679 - protein, 101 aa, Artificial Sequence
  Description of Artificial Sequence:  Synthetic peptide
VIKQKQTACLFLYIMGFLSQERAEALLRDKAPGTFLLRFSESCRDGGIIITWVEESQEEPYNNAKINTSSMPQIIRDFTAGEKHPVNPLIYLYPDIPRDVA

SEQ ID NO: 2680 - protein, 111 aa, Artificial Sequence; identical to SEQ ID NO: 2603
  Description of Artificial Sequence:  Synthetic peptide

SEQ ID NO: 2681 - protein, 122 aa, Artificial Sequence
  Description of Artificial Sequence:  Synthetic peptide
IPCNYITMRPHPWYIRHCSRMEAEERLQEVDQETAQHLQPDGAFILRQSEADGKGFSLSVKQGCEVLHFKVLQDEAGKYFFWISRFDSVNQLIDHHRKTSISRNRLLTLVDLVPSKRFPTNV

SEQ ID NO: 2682 - protein, 115 aa, Artificial Sequence
  Description of Artificial Sequence:  Synthetic peptide
SKTDSMETNEQPWFHGLLPREEVQLLLLKNGDFLVRMSEPSSGQARHLILSVMQNESSQEAMHYVIRNADGKFSITGKENFDSLIELINHHKQNKLHEDNPKSVLINAIGRQPWE

SEQ ID NO: 2683 - protein, 109 aa, Artificial Sequence
  Description of Artificial Sequence:  Synthetic peptide
NATLLTAPPENQWYHGRLDRFTAEERLWDASKMGSYLVRESDRKPGSYVLSYLGRTGINHFRITAVCGDYYIGGRQFNSLSDLVAYYTHCSDLLKRERLIHPTPPPEPV

SEQ ID NO: 2684 - protein, 128 aa, Artificial Sequence
  Description of Artificial Sequence:  Synthetic peptide
VSVKFVQDSSRFWYKPGISREQAIAALKEREPGAFLIRDSNSFQGAYGLALKVASPPPNVNNHSSKGDPLEQLVRHFLIETGPRGVKIKGCQNEPYFGSLSALVYQHSITPISLPCALRIPEKDPIGD

SEQ ID NO: 2685 - protein, 125 aa, Artificial Sequence
  Description of Artificial Sequence:  Synthetic peptide
FTSSIEKVKDYGWYWGPLSSEAAEKVLSSEPDGSFIVRDSSDDHYIFSLSFKLNNCVRHVRIEQDQGTFSFGSYAKFKSQTITEFIEKAVEHSRSGRYLFFLHRRPEHGPMRVQLTNPVSRFKHV

SEQ ID NO: 2686 - protein, 122 aa, Artificial Sequence
  Description of Artificial Sequence:  Synthetic peptide
LAGELSKLPRQPWYWGPMSQDEAEGKLDDADDGSFLVRDSSDDRYLLTLSFKSNGRTLHTRIEHRNGLFSLNDSEGHASVIELIENAVKESQGGVFGYMNDSTGIQNFPARLTQWVSRYSEV

SEQ ID NO: 2687 - protein, 119 aa, Artificial Sequence
  Description of Artificial Sequence:  Synthetic peptide
MPRLALRQYNFYYRVNGEKAEELLKEYGEDGDFLLRYSESNPQNFSISVRVAEDKILHIKVTKYESDMLSIFEDERTTPNQFGSITELAEFYMEFPEKLREKNGLFLELKKPVYVPYHL

SEQ ID NO: 2688 - protein, 111 aa, Artificial Sequence
  Description of Artificial Sequence:  Synthetic peptide
ACYPKPRMNTNDFLHKAIDRNNAVETLKQKGLSDGSFLIRPNSRKPGSYALTLVYKQTPYHYEVVCESDCWYFIDDGPLFDTLPAVVDHYTIFADGLPTTLLYPVPPSGRK

SEQ ID NO: 2689 - protein, 118 aa, Artificial Sequence
  Description of Artificial Sequence:  Synthetic peptide
FAASLRELEKCGWYWGPMNWEDAEMKLKGKPDGSFLVRDSSDPRYILSLSFRSQGITHHTRMEHYRGTFSLWCHPKFEDRCQSVVEFIKRAIMHSKNGKFLYFLRSRVPDPGMMGERE

SEQ ID NO: 2690 - protein, 127 aa, Artificial Sequence
  Description of Artificial Sequence:  Synthetic peptide
MIRWVTKHGCCGWYWGPMSWDDAEMRLENTPDGSFLVRDSSDDRHILSLTFRVQGSTHHTRIEHHNGKFSFWSQPTTHGSSSIVEFIEEAMRHSRNGRFLYFLRPRWPGLPPVPLQLLYPISRFQKA

SEQ ID NO: 2691 - protein, 111 aa, Artificial Sequence; identical to SEQ ID NO: 1946
  Description of Artificial Sequence:  Synthetic peptide

SEQ ID NO: 2692 - protein, 123 aa, Artificial Sequence
  Description of Artificial Sequence:  Synthetic peptide
MYKACSEMLNQVWYWGEISRRDAQRQLSDKPTGSFLVRDSETSGSQFTLSFRIVNVTLHYRLEYKDEFWNFEELKYASIVEMIEDILYRCTNDNFVCFVKVPNEMQPPLPVILKYPLSRYQNM

SEQ ID NO: 2693 - protein, 138 aa, Artificial Sequence
  Description of Artificial Sequence:  Synthetic peptide
FVDSLKALKQCGWYWGNMSWEDAESMLAQRPGEEGVFLVRDSQDPLHILTLTIRSVELSIHHVRVEHTEGKFQLYDPDRGVSRGAANCVRHPNIVTFIKLAMKHSRSGTFIYFIKTRNMGEPPVQIRLLTPISRFTCV

SEQ ID NO: 2694 - protein, 123 aa, Artificial Sequence
  Description of Artificial Sequence:  Synthetic peptide
MYKACSEMLNQVWYWGEISRRDSQRQLSDKPTGSFLVRDSETSGSQFTLSFRIVNVTLHYRLEYRDNFWHFEELKYESIVEMIEDILHRCTNDNFVCFVKVPNEMQPPFPVILKYPLSRYSNM

SEQ ID NO: 2695 - protein, 127 aa, Artificial Sequence
  Description of Artificial Sequence:  Synthetic peptide
LAKALRELSHTGWYWGNMTVNEAKEKLKEAPEGTFLIRDSSHSDYLLTISVKTSAGPTNLRIEYQDGKFRLDSIICVKSKLKQFDSVVHLIDYYVQMCKDKRTGPEAPRNGTVHLYLTKPLYTSAPP

SEQ ID NO: 2696 - protein, 106 aa, Artificial Sequence
  Description of Artificial Sequence:  Synthetic peptide
VMRALRKLQESGFYWGAMGGREASSMLRSEPPGTFLIRDSSDHHHFFTLSVQTARGTKNLRIHSEGGGFFLQPDPQNAHQLPHFDCVLKLVAHYMGRGPEAERSGA

SEQ ID NO: 2697 - protein, 114 aa, Artificial Sequence
  Description of Artificial Sequence:  Synthetic peptide
LVPDLIEIISNPCYWGVMDRYEAEALLEGRPEGTFLLRDSAQEDYLFSVSFRRYNRSLHARIEQWNHNFSFDAHDPCVFHSSTVTGLLEHYKDPSSCMFFEPLLTVPLNRTFPF

SEQ ID NO: 2698 - protein, 132 aa, Artificial Sequence
  Description of Artificial Sequence:  Synthetic peptide
ITTTFQHLNTSGWYWGGLTAGDARAALIGAPEGTFLVRDSSHPLYLFTLSVQTWRGPTNIRIEYDSGRFRLDSSFPARSCLLSFSALPSLVHHYSSARPEEEKKAEDHHHMVAKDTGILLKLRKPLHRPQAF

SEQ ID NO: 2699 - protein, 123 aa, Artificial Sequence
  Description of Artificial Sequence:  Synthetic peptide
SPEEEAGVLNKEWYAASCDRKKAEEALYTSCKDGSFLVRQSSGQDPKQPYTLVVFYNRKVYNIPIRFIEETRQYALGREKSGEEKFSSVAEMIMSHQRMPLVLIDSQNNTKDSTKLRQAIKVS

SEQ ID NO: 2700 - protein, 134 aa, Artificial Sequence
  Description of Artificial Sequence:  Synthetic peptide
YKLPPANTTRDQWYHGTLTREEAVAILKKHAKELLAKQPEVDTSGCFLVRYSESPAASGLVLTLLCDQVVKNFRISQADLYQNGNKVQSGGSKFLYIDDGPYWPSVEHLIAHFMRFSYGLPVSLKYPVPPQPKP

SEQ ID NO: 2701 - protein, 127 aa, Artificial Sequence
  Description of Artificial Sequence:  Synthetic peptide
PPLMRKRLRLARRCFRPVSRTEAEVLLERHPDCGNMLLRPGRDGCSLAVTTRQDLNGSVFRHYRVTQRDQGGYVIDVENPVRALLELVLFKVAAKIPCADLHEVIDALVEKTAGTLQPFLLEEPYEE

SEQ ID NO: 2702 - protein, 106 aa, Artificial Sequence
  Description of Artificial Sequence:  Synthetic peptide
TIDNINKLSAKIWFHGDIVREQATSRLSKAAEGAFLIRLSSTEPKTCPFTLSMKNNQHRRIQLIDENNFTGFKIQGKTAVYNSLIELVEKCNDYPLLVPCPKFTQE

SEQ ID NO: 2703 - protein, 126 aa, Artificial Sequence
  Description of Artificial Sequence:  Synthetic peptide
ILYEMIELLKKRWFHFDISRDISEKRLRGRPENTFLLRLSANDPIKTPFTISKTKGSKPTHKRVSREDVQINEIKQFPMGYKFTVPLDGNELVFGSITQMVEELHRIGNLSIPCPITEIKVPYLTD

SEQ ID NO: 2704 - protein, 126 aa, Artificial Sequence
  Description of Artificial Sequence:  Synthetic peptide
DEYIRTTLLSYPWYHGVLFGRVTEKLLKWENSYLVRRSILKTDKFLCISARVDNKVSHFPLNCNVEGWSCAKLFERFPAMPNRRYQHIWQLLDAWSLVVNYIVPVRRNKLVVLHSQVLPNSVSLGH

SEQ ID NO: 2705 - protein, 129 aa, Artificial Sequence
  Description of Artificial Sequence:  Synthetic peptide
NKVICSDLYDCDWYWGDLDWKWAERLLLLCPIGYFLIRDSRSETHLFTVSYHFQDRVYHSRLSLEDSRRNLGSRQPYVSRDYWNLVEIIERSLEQSLTGQQEMLHYRRGHEAEAARVNLTRPLTKRELL

SEQ ID NO: 2706 - protein, 124 aa, Artificial Sequence
  Description of Artificial Sequence:  Synthetic peptide
VVPPRLLEGIQSYCHGPVSMEFAINKLKKAGNQRGLFILRCSPKEFNKYFLTFSIERDGVIEYKHCLITKNDNGDYNLSGAKKSFATLKDLLNCYQKETVRSDGIIFQFRRCCPPKPKEKSNLI

SEQ ID NO: 2707 - protein, 118 aa, Artificial Sequence
  Description of Artificial Sequence:  Synthetic peptide
IPKNYIEMKAHPWFFGRIPRARAEEILNKQRHDGAFLIRESESAPGDFSLSVKFGNDVQHFKVLRDGAGKYFLWVVKFNSLNELVDYHRTTSVSRNQQIFLRDIEQVPQHPTYVQALF

SEQ ID NO: 2708 - protein, 108 aa, Artificial Sequence
  Description of Artificial Sequence:  Synthetic peptide
VPEVQKPLHEQLWYHGALPRAEVAELLTHSGDFLVRESQGKQEYVLSVLWDGQPRHFIIQSADNLYRLEGDGFASIPLLVDHLLRSQQPLTKKSGIVLNRAVPKDKWV

SEQ ID NO: 2709 - protein, 108 aa, Artificial Sequence
  Description of Artificial Sequence:  Synthetic peptide
VPSRVGKFAGKGWYYGNVTRHHAECALNERGVEGDFLIRDSESSPSDFSISLKAVGKNKHFKVQHQDGAYCIGQRRFSSMDELVEHYKKAPIFTSEQGDKLYLVKALG

SEQ ID NO: 2710 - protein, 125 aa, Artificial Sequence
  Description of Artificial Sequence:  Synthetic peptide
YVGQADTMETEDWFFKDISRKDAERQLLAPANRAGSYLIRESETAKGSFSLSVRDVDDGGTDLVKHYKIRLLDNGGYYISPKISFTDISSMIKHYHNRNPEPEPPGKADGLCRKLDRPCVKPKAE

SEQ ID NO: 2711 - protein, 109 aa, Artificial Sequence
  Description of Artificial Sequence:  Synthetic peptide
LKKHHKPHWNDGGFVNKQQAHDLLINKPDGTFLLRFSDSEIGGITIAWKFDSPERNLWNLKPFTTRDFSIRSLADRLGDLSYLIYVFPDRPKDEVFSKYYTPVLAKAVD

SEQ ID NO: 2712 - protein, 116 aa, Artificial Sequence
  Description of Artificial Sequence:  Synthetic peptide
VLLEFVTAARMHWYFGKITRRESERLLLNPENPRGTFLVRESETTKGAYCLSVSDFDNAKGLNVKHYKIRKLDSGGFYITSRTQFSSLQQLVAYYSKHADGLCHRLTNVCGSTSGS

SEQ ID NO: 2713 - protein, 107 aa, Artificial Sequence
  Description of Artificial Sequence:  Synthetic peptide
PVPQTNAHESKEWYHANLSRSQAENMLMRVPRDGAFLVRKRAEPNSFAISFRAEGKIKHCRVQQEGQTVVLGTSEFDSLVDLISYYEKHPLYRKMKLRYPINEDTLE

SEQ ID NO: 2714 - protein, 122 aa, Artificial Sequence
  Description of Artificial Sequence:  Synthetic peptide
YPLNCSDPTSERWYHGHISGGQAESLLQAKGEPWTFLVRESLSQPGDFVLSVLNDQPKAGPGSPLRVTHIKVMCEGGRYTVGGSETFDSLTDLVEHFKKTGIEEASGAFVYLRQPYYATRVN

SEQ ID NO: 2715 - protein, 115 aa, Artificial Sequence
  Description of Artificial Sequence:  Synthetic peptide
FVAPVETLEVEKWFFRTISRKDAERQLLAPMNKAGSFLIRESESNKGAFSLSVKDVTSQGEMVKHYKIRSLDNGGYYISPRITFPTLQALVQHYSEKGDGLCQKLTLPCVNPAPK

SEQ ID NO: 2716 - protein, 108 aa, Artificial Sequence
  Description of Artificial Sequence:  Synthetic peptide
VPEVQKPLYEQLWYHGAIPRAEVAELLTHTGDFLVRESQGKQEYVLSVMWDGHPRHFIIQSLDNLYRLEGDGFPSIPLLITHLLSSQQPLTKKSGVVLFRAVPKDKWV

SEQ ID NO: 2717 - protein, 115 aa, Artificial Sequence
  Description of Artificial Sequence:  Synthetic peptide
FVTRVETLEVEKWFFRSISRKDAERQLLAPVNKAGSFLIRESETNKGAFSLTVKDVTTQGEMIKHYKIRSLDEGGYYISPRITFPTLQALVQHYSQKGDGLCQRLTQPCVSLAPQ

SEQ ID NO: 2718 - protein, 110 aa, Artificial Sequence
  Description of Artificial Sequence:  Synthetic peptide
EPSSSGRFAGKQWYYGKVTRHQAEVALNQRGSEGDFLIRDSESSPNDFSISLKAQSKNKHFKVQLKDNLYCIGQRKFNTMEELVEHYKKAPIFTSEQGDKLYLVKALAAS

SEQ ID NO: 2719 - protein, 114 aa, Artificial Sequence
  Description of Artificial Sequence:  Synthetic peptide
SPLSSVIHRTQLWFHGRIMREESHRMIMQQGQVDGLFLLRDSQSNPKAFVLTLCHHQKIKHFQILPFEEDGQVFFSLDDGSTKFTDLIHLVEFYQLNRGILPCKLKHPCTVVAL

SEQ ID NO: 2720 - protein, 126 aa, Artificial Sequence
  Description of Artificial Sequence:  Synthetic peptide
ESEGDASLAGYPWFHGTLSRVRAAQLVLAGGARSHGLFVIRQSETRPGEYVLTFNFQGKAKVRQRRAESTFAVVAGTRTGSATSTTCGSTPCRTLLRHFHAHPIPLESGGSADITLRSYVQVQRSS

SEQ ID NO: 2721 - protein, 108 aa, Artificial Sequence
  Description of Artificial Sequence:  Synthetic peptide
PVPQPPSHENKEWFHSQLSRHEAEDMLKRVRQDGAFLVRKSERESDAFAISFRADGKIKHCRIKQEGRLFTIGSAQFESLAELCSYYHKYPLYRKMKLKAPVNQEVVD

SEQ ID NO: 2722 - protein, 113 aa, Artificial Sequence
  Description of Artificial Sequence:  Synthetic peptide
RSGSFSCFPLLRRFAGPMERLQAEAELINRVNSTYLVRHRSREYTEYAISIKYNNDVKHIKILTKEGCFYIAENKKFRSISELIEYYKHHSLREGFRSLDTTLHFPYRELENA

SEQ ID NO: 2723 - protein, 118 aa, Artificial Sequence
  Description of Artificial Sequence:  Synthetic peptide
YPLNCSDPTNERWYHGYLSGTDSEKLLQKTGEPWTFLVRESRSKPGDFVISILTPEQKDGAQKVTHVKINTVGDTYNIGRETFESLTDLIEWHKKKPIEEATGTFLYLKKPYYSTRVN

SEQ ID NO: 2724 - protein, 110 aa, Artificial Sequence
  Description of Artificial Sequence:  Synthetic peptide
IPGICVARVYHGWLFEGLGRDKAEELLQLPDTKVGSFMIRESETKKGFYSLSVRHRQVKHYRIFRLPNNWYYISPRLTFQCLEDLVNHYSEVADGLCCVLTTPCLTQSTA

SEQ ID NO: 2725 - protein, 123 aa, Artificial Sequence
  Description of Artificial Sequence:  Synthetic peptide
EMYISHVLKFYPWYHGMMFGQTVEKLLKWDYAYLVRRAMQRNSKKVLCLSVKIDGKICHFTLNSNKDGWSCGKLLAKFPKITPKRFQHIHHLLDAWSLVVNSIVPVPRRQLVLQHNCIHLENI

SEQ ID NO: 2726 - protein, 118 aa, Artificial Sequence
  Description of Artificial Sequence:  Synthetic peptide
SEIEEHNIETEAYYFTVDRPIAERMLAGREDGACLVRPFKTTDVCIKYIVSICVGEQFYHLFVRQIDRRQRFAIGQKKLHERIFASPRDIVDFYSEHPLLCTNKSQSQCVRLTPISYA

SEQ ID NO: 2727 - protein, 108 aa, Artificial Sequence
  Description of Artificial Sequence:  Synthetic peptide
IVSMEDQLKREPWYQGKMSRKEAERLLKVNGDFLVRESTTTPGQYVLTGLQCGQPKHLLLVDPEGVVRTKDHRFESVSHLISYHMDNHLPIISAGSELCLQQPVERRQ

SEQ ID NO: 2728 - protein, 108 aa, Artificial Sequence
  Description of Artificial Sequence:  Synthetic peptide
SPARSGKFAGRDWYYGDITRLQAECILNERGEEGDFLIRDSESSPSDFSVSLKAVGKNKHFKVQLTDGVYCIGQRRFGSMDELVEHYKKAPIFTSEHGEKLYLVKPLL

SEQ ID NO: 2729 - protein, 108 aa, Artificial Sequence
  Description of Artificial Sequence:  Synthetic peptide
RPSLTGKFAGNPWYYGKVTRHQAEMALNERGHEGDFLVRDSESSPNDFSVSLKAQGKNKHFKVQLKETVYCIGQRKFSTMEELVEHYKKAPIFTSEQGEKLYLVKHLS

SEQ ID NO: 2730 - protein, 118 aa, Artificial Sequence
  Description of Artificial Sequence:  Synthetic peptide
EEHWWLIQDKNGWYNKNINRSKAEMLLRDEGREGAFMVRDSRQPGMYTVSVFTKALSTDNNPVIKHYHINETTDFPKRYYLAEKHVFNCIPELINYHQHNAGGLVTRLRYAVSSWKKK

SEQ ID NO: 2731 - protein, 110 aa, Artificial Sequence
  Description of Artificial Sequence:  Synthetic peptide
IKKHILPLWIDGYIMGFVSKEKERLLLKDKMPGTFLLRFSESHLGGITFTWVDQSENGEVRFHSVEPYNKARLSALPFADILRDYKVIMAENIPENPLKYLYPDIPKDKA

SEQ ID NO: 2732 - protein, 118 aa, Artificial Sequence
  Description of Artificial Sequence:  Synthetic peptide
LLLSGEDLRSHAWYHGRIPRQVSENLVQRDGDFLVRDSLSSPGNFVLTCQWKNLAQHFKIHRTVLRLSEAYSRVQYQFETESFDSIPGLVRCYVGNRRPISQQSGAIIFQPINRTVPL

SEQ ID NO: 2733 - protein, 139 aa, Artificial Sequence
  Description of Artificial Sequence:  Synthetic peptide
RTTYIKRVIAHPSFHNISFKQAEKMMETMDQGDVIIRPSSKGENHLTVTWKVNDGIYQHVDVREEGKENAFSLGSTLWINTEEFEDLDEIVARYVQPMASFARDLLNHKYYQDCNGGDKKKLEELLIKTKKEKPTFIPY

SEQ ID NO: 2734 - protein, 118 aa, Artificial Sequence
  Description of Artificial Sequence:  Synthetic peptide
AEIEERHVEKEQYYFTVDRPTAERMLHGREDGSCLVRPFKAADQWIRYIVSIWAADQYYHLFIRQVDRRQRYAIGQKKSQERCFGSPSEIVEFYTEHPLLCTNKVRSQCVQLRPISYA

SEQ ID NO: 2735 - protein, 111 aa, Artificial Sequence
  Description of Artificial Sequence:  Synthetic peptide
VKKYILALWNEGYIMGFISKERERALLSPKPPGTFLLRFSESSKEGGITFTWVEKDISGKTQIQSVEPYTKQQLNNMSFADIIMGYKIMDATNILVSPLVFLYPDIPKEEA

SEQ ID NO: 2736 - protein, 104 aa, Artificial Sequence
  Description of Artificial Sequence:  Synthetic peptide
STAMAEQLRGEPWFHGKLSRREAEALLQVNGDFLVRESTTTPGQYVLTGLQSGQPKHLLLVDPEGVVSVAGSVSHLISYHMDNHLPIISAGSELCLQQPVERKL

SEQ ID NO: 2737 - protein, 107 aa, Artificial Sequence
  Description of Artificial Sequence:  Synthetic peptide
MDLPYYHGCLTKRECEALLLKGGVDGNFLIRDSESVPGALCLCVSFKKLVYNYRIFREKNGYYRIETEPSTPKTIFPNLEELISKFKTPGQGMVVHLSNPIMRSGFC

SEQ ID NO: 2738 - protein, 114 aa, Artificial Sequence
  Description of Artificial Sequence:  Synthetic peptide
YQRHISTLWQEGIIYGYMGRQEVNDALQNQDPGTFIIRFSERNPGQFGIAYIGVEMPARIKHYLVQPNDTAAAKKTFPDFLSEHSQFVNLLQWTKDTNGAPRFLKLHKDTALGS

SEQ ID NO: 2739 - protein, 114 aa, Artificial Sequence
  Description of Artificial Sequence:  Synthetic peptide
NGGSPPSLQDAEWYWGDISREEVNEKLRDTPDGTFLVRDASSKIQGEYTLTLRKGGNNKLIKVFHRDGHYGFSEPLTFCSVVDLINHYRHESLAQYNAKLDTRLLYPVSKYQQD

SEQ ID NO: 2740 - protein, 122 aa, Artificial Sequence
  Description of Artificial Sequence:  Synthetic peptide
YVAPADSIQAEEWYFGKMGRKDAERLLLLPGNQRGTFLVRESETTKGAYSLSIRDWDEMKGDNVKHYKIRKLDSGGYYITTRAQFDTLQKLVKHYTEHADGLCYRLTTVCPTVKPQTQGLAK

SEQ ID NO: 2741 - protein, 108 aa, Artificial Sequence
  Description of Artificial Sequence:  Synthetic peptide
VAPNEEQLRRETWYHSRMSRRDAERLLIRDGDFLVRESTTNLGQYVLTGMHCGLPKHLLLVDPEGVVRTKDMLFDSISHLIAYHLKNELPIVAAESELHLKQAVRRKQ

SEQ ID NO: 2742 - protein, 109 aa, Artificial Sequence
  Description of Artificial Sequence:  Synthetic peptide
ISAIEKPLSEQDWYHGAIPRVEAQELLKQQGDFLVRESHGKPGEYVLSVFSDSQRRHFIIQFADNQYRFEGTGFPTIPQLIEHHYTTKQVITKKSGVVLLNPVVKDKKW

SEQ ID NO: 2743 - protein, 117 aa, Artificial Sequence
  Description of Artificial Sequence:  Synthetic peptide
YIAHVKSIDAEDWYYGKVGRKDAEKKLLAPGLQKGTFIVRDGEANPGTFSLSVRDHDPGKGEHIKHYRIRKLDNDSGYYITQRSQFQTLLELVHHYEQSADGLCCSLSVPCPKENPI

SEQ ID NO: 2744 - protein, 113 aa, Artificial Sequence
  Description of Artificial Sequence:  Synthetic peptide
CVPKPVDYSSQLWFAGPMERSQAELELLERNNSTYLVRHRTRECTEYALSIKFNDKVKHIKILTKDGCFYIAESRLFKTVLDLVEYYKQYSLKEGFSSLDTTLQVPYREPSNG

SEQ ID NO: 2745 - protein, 113 aa, Artificial Sequence
  Description of Artificial Sequence:  Synthetic peptide
CVPRTVDYSSQPWFAGPMERHHAESELMERENSTYLVRYRSRESREYAISIKYNNDVKHLKVLTKEGCFYIAESRTFKNVLGLVEYYKQHSLKEGFRTLDTTLQVPFKELGTG

SEQ ID NO: 2746 - protein, 111 aa, Artificial Sequence
  Description of Artificial Sequence:  Synthetic peptide
YVAKVQSLESEPWFFGSIKRMDAEKKLLLSQNEHGSFLIRESESRVGDYSLSVRDGDTIKHYRIRQLDEGGYFIARRCTFATLVELVQHYQRDADGLCVNLRRPCVLIEKP

SEQ ID NO: 2747 - protein, 111 aa, Artificial Sequence
  Description of Artificial Sequence:  Synthetic peptide
YVAPEKSYEAEEWYFGDVKRAEAEKRLMVRGLPSGTFLIRKAETAVGNFSLSVRDGDSVKHYRVRKLDTGGYFITTRAPFNSLYELVQHYTKDADGLVCALTLPCPKDKPV

SEQ ID NO: 2748 - protein, 111 aa, Artificial Sequence
  Description of Artificial Sequence:  Synthetic peptide
YVAREKSIESQPWYFGNIRRIDAEKRLLQNLNEHGAYLVRDSESKQHDFSLSVRENDTVKHYRIRQLDHGGYFIARRRPFATLHDLIAHYQREADGLCVNLGKACVKSEAP

SEQ ID NO: 2749 - protein, 111 aa, Artificial Sequence
  Description of Artificial Sequence:  Synthetic peptide
YVAKRQSLESEPWYFQNIKRVDAEKKLLLPQNEHGSFLIKESESRRGDFSLSLRDGDTVKHYRIRQLDHGGYFIARRSTFTTLTDLVKHYTVEADGLCVNLRKPCVLVEKP

SEQ ID NO: 2750 - protein, 111 aa, Artificial Sequence
  Description of Artificial Sequence:  Synthetic peptide
YVAGLSTFEAEEWYYGDVTRAEAEKWLLFPGNPSGTFLVRTSSSQKSGVSLSVRDGESIKHYRIRRLDDGGYFIASRATFRDLSDLIEHYSRDSDGLAQRLTLPCPRADLP

SEQ ID NO: 2751 - protein, 111 aa, Artificial Sequence
  Description of Artificial Sequence:  Synthetic peptide
AKVAPETLSDQPWYFSGISRTQAQQLLLSAPNAPGAFLVRPSESSHGDFSLSVRAQTKVCHYRISMAADGSLYLQKDRLFPSLDELLAYYKANWKLIQSPLLQPCTAQKSL

SEQ ID NO: 2752 - protein, 118 aa, Artificial Sequence
  Description of Artificial Sequence:  Synthetic peptide
LQLSSEDLRSHAWYHGRIPRQVAEDLVQRDGDFLIRDSLSCPGNFVLTCQWKNTSQHFKINRTILRLSEAYCRVQYQFELESFDSIPGLVRYYVGNRTPISKQSGAIIFQPINRTVPL

SEQ ID NO: 2753 - protein, 114 aa, Artificial Sequence
  Description of Artificial Sequence:  Synthetic peptide
RVDPALPLEKQPWYHGAITRAEAESRLQSCKEAAYLVRNSESGTSRYSIALKTSQGCVHIIVAQTKDNKYTLNQTSAVFGSIPEVVHYYSSEKLPFKGAEHMTLLYPVHSKLHQ

SEQ ID NO: 2754 - protein, 112 aa, Artificial Sequence; identical to SEQ ID NO: 2631
  Description of Artificial Sequence:  Synthetic peptide

SEQ ID NO: 2755 - protein, 120 aa, Artificial Sequence
  Description of Artificial Sequence:  Synthetic peptide
GVPNDELHFGEKWFHGKLARGREEAEELLRRYSHLSDGTFLVRQCVTFVGDYCLSFWRKGKVNHCRIKLKQEMGQTQYYLIDTNCFDSLYSLITYYRSHPLRSQEFLITLQEPVPQPNKH

SEQ ID NO: 2756 - protein, 122 aa, Artificial Sequence
  Description of Artificial Sequence:  Synthetic peptide
DIPPTELHFGEKWFHKKVEKRTSAEKLLQEYCMETGGKDGTFLVRESETFPNDYTLSFWRSGRVQHCRIRSTMEGGTLKYYLTDNLTFSSIYALIQHYRETHLRCAEFELRLTDPVPNPNPH

SEQ ID NO: 2757 - protein, 122 aa, Artificial Sequence
  Description of Artificial Sequence:  Synthetic peptide
DTPPTELHFGEKWFHKKVESRTSAEKLLQEYCAETGAKDGTFLVRESETFPNDYTLSFWRSGRVQHCRIRSTMEGGVMKYYLTDNLTFNSIYALIQHYREAHLRCAEFELRLTDPVPNPNPH

SEQ ID NO: 2758 - protein, 115 aa, Artificial Sequence
  Description of Artificial Sequence:  Synthetic peptide
  MOD_RES (52): x = any natural occuring amino acid
DWFHGKLGVGHGGRHIAERLLTEYCTEMGAPDGSFLVRESETFVGDYVLSIXCDEKVQHFRIHWRQDTNIHRFFLTDNLVFDSLYDLITHYRETPMRYNGLEMRLTEPVPQPSTR

SEQ ID NO: 2759 - protein, 121 aa, Artificial Sequence
  Description of Artificial Sequence:  Synthetic peptide
EDTQKDLHCTEPWFHGHMKDGRQMAERLIYEYCAETGGQDGTFLVRPSDRVVLSYTLSFWRNGRVQHCRVRVGNQGGRPYYFLTANLHFPSLISLIQHYRENPLRCQDFELRLTDAVPQPS

SEQ ID NO: 2760 - protein, 111 aa, Artificial Sequence
  Description of Artificial Sequence:  Synthetic peptide
ENAANALIHARYRIAQLDKAVGLKREPQDGIFLIRGSSSHGDKLVLSVLHGERVSHCLIEQNEEGWGFEHSNVYLTTISDFVRYYSHFSLETHADAIKTPLRTPAFDAVTS

SEQ ID NO: 2761 - protein, 127 aa, Artificial Sequence
  Description of Artificial Sequence:  Synthetic peptide
IAQSMGELRRSGWYWGNMTVDEAKEKLQDAPEGTFLVRDSSHTDYLLTISVKTSAGPTNLRIEYREGKFRLDSVVCVRSRLKQFDSVVHLIEYYVLLSKNKKIESETLPNRTVHLWLVKPLYTSTPS

SEQ ID NO: 2762 - protein, 106 aa, Artificial Sequence
  Description of Artificial Sequence:  Synthetic peptide
ISNTTSMLEESGFYWGPMTVEEAHLKLKKESVGTFLIRDSRQSDVFFTLSYKAQNGPVSIRINFKNSKFSLTGSKESFDSLFKLLEHYISSPKKGLIRPCRKEPVQ

SEQ ID NO: 2763 - protein, 120 aa, Artificial Sequence
  Description of Artificial Sequence:  Synthetic peptide
LVPDLIEIISNPCYWGVMDRYEAEALLEGRPEGTFLLRDSAQEDYLFSVSFRRYNRSLHARIEQWNHNFSFDAHDPCVFHSSTVTGLLEHYKDPSSCMFFEPLLTVPLNRTFPFSLQYIC

SEQ ID NO: 2764 - protein, 106 aa, Artificial Sequence
  Description of Artificial Sequence:  Synthetic peptide
IMETARHLEHSGFYWGPLGVEEAHRMLRTSALGSFLIRDSRQRDVLFTLSYHSVSGPISVRIEYKEKQFSLAGSKRSFSSIFVLLDHYISAPQNILDAPYMKQAQT

SEQ ID NO: 2765 - protein, 124 aa, Artificial Sequence
  Description of Artificial Sequence:  Synthetic peptide
SPGEEETPLDEEWYVSYITRPEAEAALRKINQDGTFLVRDSSKKTANNPYVLMVLYKDKVYNIQIRYQEESQVYLLGTGLRGKEDFLSVSDIIDYFRKMPLLLIDGKNRGSRYQCTLTHAAGCL

SEQ ID NO: 2766 - protein, 111 aa, Artificial Sequence
  Description of Artificial Sequence:  Synthetic peptide
DAEEEAGVYKKVWYASGCDRKTAEDALIRSAKDGSFLLRKSSGVDAQQPYTLVVFYNSRVYNIPVRYIASTKQYSLGKEKQGEERFSSVCDMIENHQKNPLVLVDSLSNTK

SEQ ID NO: 2767 - protein, 118 aa, Artificial Sequence
  Description of Artificial Sequence:  Synthetic peptide
QPQQVNELEGHPWYNGGIGRQESEKYLHQCRKDGAFIVRNSTRGDPANPYSLALWFNGRVRNLQIRKRKDQRYALGSRKDNELAFDTPVQLIEHHMTNSLILAQDEGKTILKVGVPIY

SEQ ID NO: 2768 - protein, 111 aa, Artificial Sequence
  Description of Artificial Sequence:  Synthetic peptide
AKEEARRVLEMPSCFLKVSRLEAQLLLERYPECGNLLLRPSGDGTDGVSVTTLQTLNGTPMVRHYKVKREGAKYVIDVEEPFSCTSLEAVVNYFVSYSNKALVPFLLDEDY

SEQ ID NO: 2769 - protein, 113 aa, Artificial Sequence
  Description of Artificial Sequence:  Synthetic peptide
VLKEIRTLEGVSYYHGMVARDLVESKLTRCGDYLIRATDNRIMEFEFILSFFNKKRIHSHLTIKCDVEAGKWALGLLSVNQFSSVVDLTNFYKTNPIGAGFFLKRAISKGKYM

SEQ ID NO: 2770 - protein, 113 aa, Artificial Sequence; identical to SEQ ID NO: 2228
  Description of Artificial Sequence:  Synthetic peptide

SEQ ID NO: 2771 - protein, 108 aa, Artificial Sequence
  Description of Artificial Sequence:  Synthetic peptide
ALRLVPCLSLMPWFHGKISGPEAVCKLQPAEDGLFLVRESIRHPGDYVLCVSVSGEVIHYRVIYQDNKLTIDNQEYFYNLIDMVEFYSKNKGSIATTLLKPKPKQGAK

SEQ ID NO: 2772 - protein, 122 aa, Artificial Sequence
  Description of Artificial Sequence:  Synthetic peptide
HPLGCQDPTSERWYHGHLSGKEAEKLLMEKGRPGSFLVRESQSKPGDFVLSVLTQQLDRVDRQPRVTHIMIHFQPDGKYDVGGGEQFDTLGDLVERYRKNPMVERSGVVVHLRQPLKATRIS

SEQ ID NO: 2773 - protein, 118 aa, Artificial Sequence
  Description of Artificial Sequence:  Synthetic peptide
VPQDGEDFVGQPWYHGPLSRQKAEDLLQQDGDFLVRASKSRGGHPVISCRWRGSALHFEVLRVALRPRPGRPTALFQLEDERFPSLPALVRSYVIGQRPLSQATGAVASRPVPRQGLI

SEQ ID NO: 2774 - protein, 125 aa, Artificial Sequence
  Description of Artificial Sequence:  Synthetic peptide
IKDSSELHLSEPWFHGRLAEGRITAEKLLRDYCKGTDGNDETFLVRESNTFIGNYCISLWTRGRIQHYRIFCFPENGHKIFFLKSKECFPSMCALIDYYRQQSIDYDRFNLCLKNFLPRLNFEPL

SEQ ID NO: 2775 - protein, 122 aa, Artificial Sequence
  Description of Artificial Sequence:  Synthetic peptide
YVAPADSIQAEEWYFGKMGRKDAERLLLNPGNQRGIFLVRESETTKGAYSLSIRDWDEVRGDNVKHYKIRKLDNGGYYITTRAQFESLQKLVKHYREHADGLCHKLTTVCPTVKPQTQGLAK

SEQ ID NO: 2776 - protein, 117 aa, Artificial Sequence
  Description of Artificial Sequence:  Synthetic peptide
MAGNFDSEDRGSWYWGRLSRQEAVSLLQGQRHGVFLVRDSITIPGDYVLSVSENSKVSHYIINSISSNRQSGPGLAPPRFRIGDQEFDALPALLEFYKIHYLDTTTLIEPISKSKHS

SEQ ID NO: 2777 - protein, 118 aa, Artificial Sequence
  Description of Artificial Sequence:  Synthetic peptide
MAGNFDSEDRASWYWGKQNRQEAVNLLQGQRHGVFLVRDSTTIPGDYVLSVSENSKVSHYIINSVTNNRQSSTAGMVQSRFRIGDQEFDSLPTLLEFYKIHYLDTTTLIEPVSKSKQS

SEQ ID NO: 2778 - protein, 114 aa, Artificial Sequence
  Description of Artificial Sequence:  Synthetic peptide
LASSISLHVGQSWFHGKMSRDDAQRLITQQGLIDGVFLLRDSQSNPKTFVLSLCHMQRIKHFQIIPMDDEGEVLLSLDDGHTRFTDLIQLVEFYQLNCGVLPCKLKHHCTRVTL

SEQ ID NO: 2779 - protein, 106 aa, Artificial Sequence
  Description of Artificial Sequence:  Synthetic peptide
MGRWLHQNITGQEAETLLKSRGVHGSFLVRPSRKRQGDFSLSVRVEDSVTHIRIQNTGDYYDLYGGEQFATLSELVEFYTGQAECLQDTGGNRIELKYPLNCSDPT

SEQ ID NO: 2780 - protein, 91 aa, Artificial Sequence
  Description of Artificial Sequence:  Synthetic peptide
RAEAEKVLMLTGVEGSFLIRESESKPGQYALSIRTGDIVKHYSIRTLDEGGYYITSRVTFRTLQELVSHYRESADGLTCKLREPCRPISQP

SEQ ID NO: 2781 - protein, 123 aa, Artificial Sequence
  Description of Artificial Sequence:  Synthetic peptide
PAAEDGSLLGQPWYSGTRDRHAVESALLRFRKDGAYTVRPSSEPQGSQPLTLAVLLHGRVFNIPIRRLDGGSHYALGREGRNHEELFPSVAAMVQHYSQHPLPLVDRHSGSRQLTCLLFPTTP

SEQ ID NO: 2782 - protein, 113 aa, Artificial Sequence
  Description of Artificial Sequence:  Synthetic peptide
MLLYRKFKKGSKSEVDEMLRAEKSENPMRIVYCFGISHEHPGTFILSYIRSTNPHHEYIGLYPKGFRFRKRDFDNIDRLVSYFQKHIDKPPPDAGPSMRNVAAMVPMKSSGWG

SEQ ID NO: 2783 - protein, 110 aa, Artificial Sequence
  Description of Artificial Sequence:  Synthetic peptide
RALKKIMHQDKPWFHHKLSREEAEQRIVSAGLQEGKFLVRERTEEGSFALSLCYNNFVYHYKIDKDCTGQLSIKEGPKFDSLIQMVDHYQLKKDGLLCCLLVPCHDNNRD

SEQ ID NO: 2784 - protein, 113 aa, Artificial Sequence
  Description of Artificial Sequence:  Synthetic peptide
RVDPSVPLERQVWYHGTLSRSEAEGLLTLCKESSYLVRNSQTGRNDYSLSLRSCKGFMHMKFSLSADGRYVLGENSPPFGTIPEVIHYYTTHKLPIRGAEHMSLLYPVIVQTL

SEQ ID NO: 2785 - protein, 123 aa, Artificial Sequence
  Description of Artificial Sequence:  Synthetic peptide
HLRCPGNLLGQPWYSGNCDRHAAESALLRCQKDGAYTVRPSSGPRGTQPFTLAVLLHGRVFNIPIRRLADGRHYALGREGRNHEELFSSVAAMVQHYMQHPLPLLDRQSGSRQLTCLLFPTKP

SEQ ID NO: 2786 - protein, 116 aa, Artificial Sequence
  Description of Artificial Sequence:  Synthetic peptide
YVAPVDSIQAEDWYFGKLGRKDAERQLLSNGNARGTFLIRESETTKGAYSLSIQDWDDIKGDHVKHYKIRKLDNGGYYITTRAQFETLQQLVQHYSARAAGLCCRLIVPCHKGMPR

SEQ ID NO: 2787 - protein, 106 aa, Artificial Sequence
  Description of Artificial Sequence:  Synthetic peptide
MVRWFHRDLSGLEAEALLKGRGVHGSFLARPSRKNQGDFSLSVRVGDQVTHIRIQNTGDFYDLYGGEKFATLSELVEYYTQQQGSLQDKDGTIIDLRYPLNCSDPT

SEQ ID NO: 2788 - protein, 116 aa, Artificial Sequence
  Description of Artificial Sequence:  Synthetic peptide
NFVAMSTMEIEPWFFKNISRNEANRRLLAPGNTQGSFLIRESETTPGSYSLSIRDLDSNVGDEVKHYRIRNMDNGGFYITAKISFNALKELVQHYSRDSDGLCTKLVKPCQSKAPQ

SEQ ID NO: 2789 - protein, 113 aa, Artificial Sequence
  Description of Artificial Sequence:  Synthetic peptide
CVPKPVDYSSQLWFAGAMERLQAESELINRVNSTYLVRHRTKESGEYAISIKYNNEVKHIKIFTRDGYFHITENRKFINLMELVDYYKHHSLKEGFRSLDTTLQFPYKESENS

SEQ ID NO: 2790 - protein, 134 aa, Artificial Sequence
  Description of Artificial Sequence:  Synthetic peptide
FVARQQTIESEEWYAGKIPRNRAERLVLSSNLPKGTYLIREREADTREFALTIRDTDDQRNGACHFDSNFALSRIDFTGTVKHYKIKRLDHDQGYFITTRRTFRTLPDLVRYYSEMPDGLCCQLTFPAPRLAPT

SEQ ID NO: 2791 - protein, 110 aa, Artificial Sequence
  Description of Artificial Sequence:  Synthetic peptide
MPAMVPGWNHGNITRSKAEELLSRAGKDGSFLVRASESIPRAYALCVLFRNCVYTYRILPNEDDKFTVQASEGVPMRFFTKLDQLIEFYKKENMGLVTHLQFPVPLEEED

SEQ ID NO: 2792 - protein, 114 aa, Artificial Sequence
  Description of Artificial Sequence:  Synthetic peptide
LVDVGLPLERQGWYHGSITRIEAEAVLRLLREGSYLVRNSESTKQDYSLSLKSARGFMHMRIQKNEELNAYILGQFSKPFDSIPEMVRHFSVNRLPIRGAEHMCLLHPVIAQLL

SEQ ID NO: 2793 - protein, 126 aa, Artificial Sequence
  Description of Artificial Sequence:  Synthetic peptide
ASNGMDQHVTEKWFHGKLGAGRDGRQIAERLLSEYCMETGAPDGSFLVRESETFVGDYTLSFWRSGRVQHCRIHSRQEAGSPKFYLTDNLVFDTLFALINHYQQVALRCNEFEMKLTEPVPQTNAH

SEQ ID NO: 2794 - protein, 122 aa, Artificial Sequence
  Description of Artificial Sequence:  Synthetic peptide
DAEEEAGVYKKVWYASGCDRKTAEDALIRSAKDGSFLLRKSSGVDAQQPYTLVVFYNSRVYNIPVRYIASTKQYSLGKEKQGEERFSSVCDMIENHQKNPLVLVDSLSNTKDSTKLRHAVKP

SEQ ID NO: 2795 - protein, 134 aa, Artificial Sequence; identical to SEQ ID NO: 2700
  Description of Artificial Sequence:  Synthetic peptide

SEQ ID NO: 2796 - protein, 139 aa, Artificial Sequence
  Description of Artificial Sequence:  Synthetic peptide
AKEEARRALEVPPCFLRVSRLEAQLLLERYPECGNLLLRPSGDGADDVSVTTRQTLHGTPVFRHYKVKRDGSKYVIDVEDPLSCASLDAVVNYFVSNTNRRLVPFRLDEDYEKVLGHVEADKENGESVWVASSAPVAPG

SEQ ID NO: 2797 - protein, 97 aa, Artificial Sequence
  Description of Artificial Sequence:  Synthetic peptide
YVRDLLNYKYYRDTDGGSKEKAEEIIKAEKQKNPNKIHYIVSVSKTYPGRFLLSYLPRNKFRHEYVTVTPDGYRFRHQTFDSVNSLLKWFKEHFRDP

SEQ ID NO: 2798 - protein, 108 aa, Artificial Sequence
  Description of Artificial Sequence:  Synthetic peptide
SMFMAEQLQGEPWFHGKLSRREAKALLQLNGDFLVRESTTTPGQYVLTDLQSGQPKHLLLVDPEGVVRTKDHCFESVSHLISYHMDNHLPIISAGSELCLQQPVDRKV

SEQ ID NO: 2799 - protein, 111 aa, Artificial Sequence
  Description of Artificial Sequence:  Synthetic peptide
YVARVDSLETEEWFFKGISRKDAERQLLAPGNMLGSFMIRDRSYSLSVRDYDPRQGDTVKHYKIRTLDNGGFYISPRSTFSTLQELVDHYKKGNDGLCQKLSVPCMSSKPQ

SEQ ID NO: 2800 - protein, 124 aa, Artificial Sequence
  Description of Artificial Sequence:  Synthetic peptide
YVAPVDSIQAEEWYFGKLGRKDAERQLLSFGNPRGTFLIRESETTKGAYSLSIRDWDDMKGDHVKHYKIRKLDNGGYYITTRAQFETLQQLVQHYSGKTPKQPESRAAGLCCRLVVPCHKGMPR

SEQ ID NO: 2801 - protein, 113 aa, Artificial Sequence; identical to SEQ ID NO: 2093
  Description of Artificial Sequence:  Synthetic peptide

SEQ ID NO: 2802 - protein, 110 aa, Artificial Sequence
  Description of Artificial Sequence:  Synthetic peptide
KLIATTAHEKMPWFHGNISRDESEQTVLIGSKTNGKFLIRARDNSGSYALCLLHEGKVLHYRIDRDKTGKLSIPEGKKFDTLWQLVEHYSYKPDGLLRVLTVPCQKIGAQ

SEQ ID NO: 2803 - protein, 117 aa, Artificial Sequence
  Description of Artificial Sequence:  Synthetic peptide
QAEAELELSDYPWFHGTLSRVKAAQLVLAGGPRNHGLFVIRQSETRPGEYVLTFNFQGKAKHLRLSLNGHGQCHVQHLWFQSVLDMLRHFHTHPIPLESGGSADITLRSYVRAQGPP

SEQ ID NO: 2804 - protein, 114 aa, Artificial Sequence
  Description of Artificial Sequence:  Synthetic peptide
MTDTSSLLNDAEWYWGEISREEVNEKLRDTPDGTFLVRDASSKLEGEYTLTLRKGGNNKLIKIYHREGRYGFSEPLTFLSVVELINHYRHESLAQYNAKLDTKLLYPVSKYQQL

SEQ ID NO: 2805 - protein, 122 aa, Artificial Sequence
  Description of Artificial Sequence:  Synthetic peptide
YVAPADSIQAEEWYFGKMGRKDAERHLLHPGNLRGTFLVRESETTKGAYSLSIRDWDDVKGDNVKHYKVRKLDSGGYYITTRAQFETLPKLVKHYTEHADGLCYRLTTVCPTVKPQTQGLAK

SEQ ID NO: 2806 - protein, 122 aa, Artificial Sequence
  Description of Artificial Sequence:  Synthetic peptide
YVAPSDSIQAEEWYFGKITRRDSERLLLSLENRSGTFLVRESETTKGAYCLSVLDYDNTKGLNVKHYKIRKLDSGGFYITSRTQFGTLQHLVNHYRKHADGLCHSLTDICPILKPQTQGLSK

SEQ ID NO: 2807 - protein, 114 aa, Artificial Sequence
  Description of Artificial Sequence:  Synthetic peptide
SSLNSVIHIAQLWFHGRITREESHRIIHQQGQVDGLFLVRVSQSNPKAFVLTLCHHQKIKHFQILPCEEDGQVFFSLDEGATKFTDLIQLVEFYQLNRGVLPCKLKHPCTVVAL

SEQ ID NO: 2808 - protein, 116 aa, Artificial Sequence
  Description of Artificial Sequence:  Synthetic peptide
NYVAIDSLETEEWFFKGVSRKDAERQLLASGNKMGSFMIRDSETTKGSYSLSVRDSDSQSGDTVKHYKIRTLDNGGFYISPRITFTTLQELVSHYKKLGDGLCQALTSPCLSPKPQ

SEQ ID NO: 2809 - protein, 107 aa, Artificial Sequence
  Description of Artificial Sequence:  Synthetic peptide
SEVENRPKYYGREYHGLISREDGDLLLSVAEGSYLIRESQRQPGTYTLALRFGNQTRNFRLFYDGKHFVGEKRFESIHDLVTDGLITLYIETKAAEYISKMTINPIY

SEQ ID NO: 2810 - protein, 110 aa, Artificial Sequence
  Description of Artificial Sequence:  Synthetic peptide
LPHIRQQLWDEECFHGKLSRGAAEKLLVKDGDFLVRESVTSPGQFVLSGLQGGQAKHLLLVDPEGKVRTKDHVFDNVGHLIKYHMDNNLPIISSGSEVRLKQPIRKYDNT

SEQ ID NO: 2811 - protein, 106 aa, Artificial Sequence
  Description of Artificial Sequence:  Synthetic peptide
MVRWFHRDLSGLDAEAVLKSRGVHGSFLARPSKKNVGDFSLSVRVGEIITHIRIQNTGDYYDLYGGEKFATLAELVEYYTGDHGTLQDKDGTVIELKYPLNCSDPT

SEQ ID NO: 2812 - protein, 97 aa, Artificial Sequence
  Description of Artificial Sequence:  Synthetic peptide
SVSMAEQLRGEPWFHGKLSRREAEALLQLNGDFLVRESTTTPGQYVLTGLQSGQPKHLLLVDPEGVRWGFAMLPKLFLNSRAQVIRLPRPPRVLGLQ

SEQ ID NO: 2813 - protein, 110 aa, Artificial Sequence
  Description of Artificial Sequence:  Synthetic peptide
VHDHLKDLWNDGHIMGFVSRNQERRLLKKTVSGTFLLRFSETSEGGITCSWVEHQDDDKVVIYSVQPYTKEVLQSLPLTEIIRHYQVLAEENIPENPLRFLYPRIPRDEA

SEQ ID NO: 2814 - protein, 113 aa, Artificial Sequence
  Description of Artificial Sequence:  Synthetic peptide
PLSREMDYTAYPWFAGNMERQQTDNLLKPHASGTYLIRERPAEAERFAISIKFNDEVKHIKVVEKDSWVHITEAKKFESLLELVEYYQYHSLKESFKQLDTTLKYPYKAWERT

SEQ ID NO: 2815 - protein, 101 aa, Artificial Sequence
  Description of Artificial Sequence:  Synthetic peptide
KPLQQRPRHFGAEFHGLIDRNEAEKMLLEAGEGSYLVRESNRSRDACTLCMIFDAKVMNYKLYYDGQFYVGEKRFDTMDLLVADGLISMFVDLHAADYIKR

SEQ ID NO: 2816 - protein, 122 aa, Artificial Sequence
  Description of Artificial Sequence:  Synthetic peptide
IPSVHVAKVSRGWLYEGLSREKAEELLLLPGNPGGAFLIRESQTRREFLSFQLSGLTTNVVDIILAHHFGQEELQANLDLIQTYRMHIAQDINQDNLQLFLNSYNGRRDLEIERPILGQNDN

SEQ ID NO: 2817 - protein, 118 aa, Artificial Sequence
  Description of Artificial Sequence:  Synthetic peptide
LKLSSTDLRSHAWYHGRIPREVSETLVQRNGDFLIRDSLTSLGDYVLTCRWRNQALHFKINKVVVKAGESYTHIQYLFEQESFDHVPALVRYHVGSRKAVSEQSGAIIYCPVNRTFPL

SEQ ID NO: 2818 - protein, 113 aa, Artificial Sequence
  Description of Artificial Sequence:  Synthetic peptide
RVDPTLPLEKQPWFHGLLSRADAENLLSLCKEGSYLVRLSESSPQDCSLSLRSSQGFLHLKFARTRENQFVLGQHSGPFPSVPELVLHYSSRPLPVQGAEHLALLYPVVSQTP

SEQ ID NO: 2819 - protein, 112 aa, Artificial Sequence
  Description of Artificial Sequence:  Synthetic peptide
RVDPTIPLEKQIWYHGAISRSDAENLLRLCKECSYLVRNSQTSKHDYSLSLKSNQGFMHMKLAKTKDKYVLGQNSPPFDSVPEVIHYYTTRKLPIKGAEHLSLLYPVAVRTL

SEQ ID NO: 2820 - protein, 147 aa, Artificial Sequence
  Description of Artificial Sequence:  Synthetic peptide
FPICDMDINKEPWFHGVLPRAEVERLLQNQGDFLVRQTSKRSSGRDTIGHWNGTNGDLINGNHNETILNKDHNMDGTVLRMVLSVFWHGHRHFILYGGPETGEGWHLEDGHFSTIRELIEYHMKTQTPVTAKSGACLVTPISRPDWE

SEQ ID NO: 2821 - protein, 120 aa, Artificial Sequence
  Description of Artificial Sequence:  Synthetic peptide
ADGGSDLFQDLGWYHSNLTRHAAEALLLSNGRDGSYLLRDSNEQTGLYSLSVRAKDSVKHFHVEYTGYSFKFGFNEYSSLKDFVKHFANQPLIGSETVNSGVVFLLISVARGLIQLVSTH

SEQ ID NO: 2822 - protein, 116 aa, Artificial Sequence
  Description of Artificial Sequence:  Synthetic peptide
QEREYRRLLDECWYHENLPRSLSLQLLADKLPGSFLVRKSTTQPDCYALSLRVPPGSGPRIAHYLIVRTSTEGYKIKGFQKEFSSLRALIVHHSVMPEALPVPLAVPRPVNLVVKT

SEQ ID NO: 2823 - protein, 114 aa, Artificial Sequence
  Description of Artificial Sequence:  Synthetic peptide
RNDDDNVLNQAPWYQALLPREIAFELLAREEVGSFLVRNSATHPGCCALSVRVPNKDNPLGITHYLIQKTSQGVRLKGLDKEWPSLQALVTHLTVIPEMLPCPLKLSQYTANPI

SEQ ID NO: 2824 - protein, 119 aa, Artificial Sequence
  Description of Artificial Sequence:  Synthetic peptide
SKYWYKPDISREQAIALLKDREPGAFIIRDSHSFRGAYGLAMKVASPPPTVMQQNKKGDITNELVRHFLIETSPRGVKLKGCPNEPNFGCLSALVYQHSIMPLALPCKLVIPDRDPMEE

SEQ ID NO: 2825 - protein, 129 aa, Artificial Sequence
  Description of Artificial Sequence:  Synthetic peptide
DAVKFVQDTSKFWYKPDISRDQAIALLKDKEPGAFVVRDSHSFRGAYGLAMKVATPPPSALQHSKKGGDLSSELVRHFLIECTQKGVRLKGCPNEPYFGSLTALVCQHSITPLALPCKLILPDRDPVED

SEQ ID NO: 2826 - protein, 115 aa, Artificial Sequence
  Description of Artificial Sequence:  Synthetic peptide
LTDELKKLAKQGWYWGPITSWEAEGKLVNMPDGSFLVTESSVDHYLLSMSCHSHCRTLHTRMEHSNGRLSFYEQLGFGGTHIHRSGLPGFAAYPVSLTNLVSCFLQVRSLQYLCR

SEQ ID NO: 2827 - protein, 115 aa, Artificial Sequence; identical to SEQ ID NO: 2826
  Description of Artificial Sequence:  Synthetic peptide

SEQ ID NO: 2828 - protein, 110 aa, Artificial Sequence
  Description of Artificial Sequence:  Synthetic peptide
TEDYVDVLNPMPACFYTVSRKEATEMLQKNPSLGNMILRPGSDSRNYSITIRQEIDIPRIKHYKVMSVGQNYTIELEKPVTLPNLFSVIDYFVKETRGNLRPFICSTDEN

SEQ ID NO: 2829 - protein, 129 aa, Artificial Sequence
  Description of Artificial Sequence:  Synthetic peptide
TLLEQIIRTHAVWYLPHMGRPEVLHLLRRMEPGNFIVRASTRENCMALSVRLAPGAHVEIDHYIIEKLVVPLKSAADSVVPQVTTAKAVRLEGSPLTFRSLPLLIEHYCVNERANLISIISITMHGIQR

SEQ ID NO: 2830 - protein, 114 aa, Artificial Sequence
  Description of Artificial Sequence:  Synthetic peptide
DAEPSFSLPLSNRFNGTLIAHHSNQARLYAVCTLEDPIYIITELMKYGSLLDYLQMLDNGRVKHYKLRKAENGHYFVSRTKTFPTLKQLVEHYASQADGLCACLGEPCKKMEVP

SEQ ID NO: 2831 - protein, 128 aa, Artificial Sequence
  Description of Artificial Sequence:  Synthetic peptide
VAPPLIEHNIKNGCHGPICTEYAINRLRQEGNEAGMYVLRWSCTNFNLILMTVTCLEGPEMINNSVQYKNFQIEVKKGGYFLHGSNRSFASLKELMDHLKGQILRTDNISFTLKRCCQPKPREISNLL

SEQ ID NO: 2832 - protein, 114 aa, Artificial Sequence
  Description of Artificial Sequence:  Synthetic peptide
EEYIRNHLINLHVYHGVLFGSEVEKILQWDRSYLVRRAITEPMKKFLCISVNWKNKVFHYQLDFNDDGWSCTKLYEKFPPMPKRRFLHMSQLLEVWSQATPFLIPMPRRPNVLF

SEQ ID NO: 2833 - protein, 124 aa, Artificial Sequence
  Description of Artificial Sequence:  Synthetic peptide
VAPPRLLEEVAEQCHGPITLDFAINKLKTGGSRPGSYVLRRSPQDFDSFLLTVCVQNPLGPDYKGCLIRRSPTGTFLLVGLSRPHSSLRELLATCWDGGLHVDGVAVTLTSCCIPRPKEKSNLI

SEQ ID NO: 2834 - protein, 129 aa, Artificial Sequence
  Description of Artificial Sequence:  Synthetic peptide
VAPPLIVHNIQNGCHGPICTEYAINKLRQEGSEEGMYVLRWSCTDFDNILMTVTCFEKQLSPTSPQKQFKNFQIEVQKGRYSLHGSDRSFPSLGDLMSHLKKQILRTDNISFSPLILSCSHPCKISNLL

SEQ ID NO: 2835 - protein, 139 aa, Artificial Sequence
  Description of Artificial Sequence:  Synthetic peptide
RTTYIKRVIAHPSFHNINFKQAEKMMESMDQGDVVIRPSSKGENHLTVTWKVADGIYQHVDVREEGKENAFSLGHTLWINTEEFEDLDEITARYVQPMAAFARDLLGHKYFHECNGGDRKKMEELLVRTKKEKPTFIPY

SEQ ID NO: 2836 - protein, 140 aa, Artificial Sequence
  Description of Artificial Sequence:  Synthetic peptide
VTGRAQRVIKHPMFKSFNSTEAEQYLGSQPPGELVIRSSSKGSDHLAITWKVADGVIQHIDVLELDKENEFALGRTLKVANKYTYSDLDELIVEHVKAMARKVDELMQSDKFQKGSRSDLERWLTTYMDANPTRSTYAFC

SEQ ID NO: 2837 - protein, 122 aa, Artificial Sequence
  Description of Artificial Sequence:  Synthetic peptide
RHVNPMAAYASELLDFKYYKATVEGIKDKAEDILKEQKKENPGGIPYIISAAKNYPGKFLLSYLPRTRCRHEYVTVSPEGFRFRGQMFGRVNDLFRWFKEHFRDPVPGQSTPSTPRGAMTSR

SEQ ID NO: 2838 - protein, 114 aa, Artificial Sequence
  Description of Artificial Sequence:  Synthetic peptide
TNGSDSLLSEAEWYWGDISREEVNEKMRDTPDGTFLVRDASSKVHGEYTLTLRKGGNNKLIKIFHRGGKYGFSEPLTFLSVVELINHYRHESLAQYNAKLDSHLLFPVSKYQQD

SEQ ID NO: 2839 - protein, 118 aa, Artificial Sequence
  Description of Artificial Sequence:  Synthetic peptide
YVAPADSIQAEEWYFGKMGRKDAERLLLNPGNQRGTFLVRESETTKGAYSLSIRDWDEVKGDNVKHYKIRKLDNGGYYITTRAQFESLQKLVKHYSEHADGLCYRLTTVCPTVKPQTQ

SEQ ID NO: 2840 - protein, 112 aa, Artificial Sequence
  Description of Artificial Sequence:  Synthetic peptide
YVAYFNSLESEEWYFKGMSRKEAERQLLSPVNKSGAFMIRDSETMKGCFSLSVRDSGDTVKHYKIRTLDDGGFFISTRIPFPSLPELVRHYQGKVDGLCQCLTIPCQTVRPE

SEQ ID NO: 2841 - protein, 110 aa, Artificial Sequence; identical to SEQ ID NO: 2677
  Description of Artificial Sequence:  Synthetic peptide

SEQ ID NO: 2842 - protein, 100 aa, Artificial Sequence
  Description of Artificial Sequence:  Synthetic peptide
IPGICVARVYHGWLFEGLGRDKAEELLQLPDTKIGSFMIRESETKKGFYSLSVRHRQVKHYRIFRLPNNWYYISPRLTFQCLEDLVNHYSGKKHSIKTDA

SEQ ID NO: 2843 - protein, 127 aa, Artificial Sequence
  Description of Artificial Sequence:  Synthetic peptide
VQSCTELHQSEPWFHGRMSEGRMTAERLLQEYCAESGGVDGTFLVRESDTFVNDCTLSFWRSGRVQHCRIRSCLEGGHTVYFLTENLHFPSVYALIYYYRDNLLRCQDFNLRLTEYVPKPDTHQLEG

SEQ ID NO: 2844 - protein, 126 aa, Artificial Sequence
  Description of Artificial Sequence:  Synthetic peptide
SNVKFVQDTSKFWYKPHLSRDQAIALLKDKDPGAFLIRDSHSFQGAYGLALKVATPPPSAQPWKGDPSEQLVRHFLIETGPKGVKIKGCPTEPYFGSLSALVSQHSISPISLPCCLRIPSKDPLEE

SEQ ID NO: 2845 - protein, 118 aa, Artificial Sequence
  Description of Artificial Sequence:  Synthetic peptide
VNAKFVQDSSKFWYKPGISRDQAIAVLKDKEPGTFLIRDSNSFQGAYGLALKVATPPPNANIIGGKGDPLEQLVRHFLIETGPRGVKIKGCQNESYFGSLSALVYQHSITPISLPCAL

SEQ ID NO: 2846 - protein, 126 aa, Artificial Sequence
  Description of Artificial Sequence:  Synthetic peptide
PTMKFVMDTSKYWFKPSITREQAIELLRKEEPGAFVVRDSSSYRGSFGLALKVQEAPAPSPNRSGEDNSDLIRHFLIESSAKGVHLKGADEEPYFGSLSAFVCQHSIMALALPCKLTIPQKELGGG

SEQ ID NO: 2847 - protein, 126 aa, Artificial Sequence
  Description of Artificial Sequence:  Synthetic peptide
PTMKFVMDTSKYWFKPSISREQAIELLRKEEPGAFIVRDSSSYRGSFGLALKVQEAPTPAQSRPGEDSSDLIRHFLIESSAKGVHLKGADEEPYFGSLSAFVCQHSIMALALPCKLVIPQKELGGG

SEQ ID NO: 2848 - protein, 126 aa, Artificial Sequence
  Description of Artificial Sequence:  Synthetic peptide
PTMKFVMDTSKYWLKPSITREQAINLLRTEKPGTFVIRDSSSYRGSFGLALKVQETPASAPNRPGEDSTDFIRHFLVESSAKGVHLKGADEEPYFGSLSAFVCQHSIMALALPCKLTIPQKELGGA

SEQ ID NO: 2849 - protein, 129 aa, Artificial Sequence
  Description of Artificial Sequence:  Synthetic peptide
VTVKFVQDTSKFWYKPDISREQAIAVLKDKEPGSFVVRDSHSFRGAYGLAIKVAVPPPSVLQMNKKVGDLSNELVRHFLIECSQKGVHLKGCPNEPCFGSLTALVYQHSITPLALPCKLLIPNRDPLEE

SEQ ID NO: 2850 - protein, 107 aa, Artificial Sequence
  Description of Artificial Sequence:  Synthetic peptide
IMETARHLEHSGFYWGPLGVEEAHRMLRTSALGSFLIRDSRQRDVLFTLSYHSVSGPISVRIEYKEKQFSLAGSKRSFSSIFVLLDHYISAPQNILDAPYMKQAQTQ

SEQ ID NO: 2851 - protein, 141 aa, Artificial Sequence
  Description of Artificial Sequence:  Synthetic peptide
DEELYKSLQAMPFYHGFLPRDDLGVIIRNEGDYLIRVSEITTKKEGTTGIKRDIILSVCSSERGGTETEQTNTKSDAKSELNLGERKMRNMVIRRFDGKFGIKGNLFPTIEALLANYHVTNALETKENRFLKTPIDLQVWE

SEQ ID NO: 2852 - protein, 110 aa, Artificial Sequence
  Description of Artificial Sequence:  Synthetic peptide
VEDYEDVLNPMPACFYSVSRKEATEMLEKNPSMGNMILRPGSDSRNYSITIRQEIDLPRIKHYKVMSAGKNYTIDLEKPVTLPNLFSVIDYFVKETRGNLRPFIYSTDET

SEQ ID NO: 2853 - protein, 116 aa, Artificial Sequence
  Description of Artificial Sequence:  Synthetic peptide
DQALMTQLDNCSYFVGQPTKDSMVYNLNTQPEGAFVIRYSESKSKCLALSMRVPCSHNPSGISHYLIIRNEQGFRLKLSATKKPFPTLQMMLTHHSVLESHLPCTLHFVQWQKTNF

SEQ ID NO: 2854 - protein, 120 aa, Artificial Sequence
  Description of Artificial Sequence:  Synthetic peptide
IAKTFSYLRESGWYWGSITASEARQHLQKMPEGTFLVRDSTHPSYLFTLSVKTTRGPTNVRIEYADSSFSLDSICSRVVRTISVNKSSARSLQHLCRLVINRLVADVDCLPLPRRMADYL

SEQ ID NO: 2855 - protein, 111 aa, Artificial Sequence
  Description of Artificial Sequence:  Synthetic peptide
YVAREKSIESQPWYFGKMRRIDAEKCLLHTLNEHGAFLVRDSESRQHDLSLSVRENDSVKHYRIRQLDHGGYFIARRRPFATLHDLIAHYQREADGLCVNLGAPCAKSEAP

SEQ ID NO: 2856 - protein, 115 aa, Artificial Sequence
  Description of Artificial Sequence:  Synthetic peptide
DASVTDDIRSAEYYHGMVPRQDAEGFLKREGDFLVRKTEQMPGKVVLAMSVRVTDELCRHFMLNMDPTSNKFYFEHTHQESTISELINWHMTTKTPISAASGAKIRRPMERSPWL

SEQ ID NO: 2857 - protein, 120 aa, Artificial Sequence
  Description of Artificial Sequence:  Synthetic peptide
LVPDLLQISNSPCYWGVLNRFEAEELLEGKPEGTFLLRDSAQDEYLFSVSFRRYSRSLHARIEQNDKRFSFDVHDPCVYQDSSVTGLLRHYSDPATCLFFEPLLSSPLSRTFPFSLQHLC

SEQ ID NO: 2858 - protein, 124 aa, Artificial Sequence
  Description of Artificial Sequence:  Synthetic peptide
SPGEEENSLNEDWYVSYVTRTEAEAALRKINQDGTFLVRDSSKKTISNPYVLMVLYKDKVYNIQIRYQEESQVYLLGTGLRGKEDFLSVSDIIDYFRKMPLLLIDGKNRGSRYQCTLTYSAGYP

SEQ ID NO: 2859 - protein, 109 aa, Artificial Sequence
  Description of Artificial Sequence:  Synthetic peptide
IMSDLIQFASSDYYFDISKDEAQTYLNNKVDLTFLIRPSNTNPKFPFTISKRVKSKTVHTRIERRENSFYCTMSGKEYKAKSIPSLVDMLRNDGLIKESCPKELNDDIY

SEQ ID NO: 2860 - protein, 136 aa, Artificial Sequence
  Description of Artificial Sequence:  Synthetic peptide
TSLSAAIHRTQPWFHGRISREESQRLIRQQGLVDGLFLVRESQRNPQGFVLSLCHVQKVKHYLILPVRGHSSRPSPLPDFPPTVATPQSEEEGRLYFSMDDGLTRFTDLLQLVEFHQLNRGILPCLLRYCCTRVAL

SEQ ID NO: 2861 - protein, 108 aa, Artificial Sequence
  Description of Artificial Sequence:  Synthetic peptide
GCQCCKHLKCFVSSRGKAGWDNADPAQRHDGAFLIRESESAPGDFSLSVKFGNDVQDFRVLRDGAGKYFLSVVKFNSLNELVDYHRSTSVSRNQQIFLRDIEQMPQQP

SEQ ID NO: 2862 - protein, 116 aa, Artificial Sequence
  Description of Artificial Sequence:  Synthetic peptide
FVARVETLEVEKWFFRSICRRDAERQLLAPVNKAGAFLIRESETSKGAFSLSVKDVTTQGEVIKHYKIRSLDEGGYYISPRSAFPTLQALVQHYSSYYKNNIKVAIKTLKEGTMSP

SEQ ID NO: 2863 - protein, 116 aa, Artificial Sequence
  Description of Artificial Sequence:  Synthetic peptide
FVAMVNSLEPEPWFFKNLSRKNAEARLLASGNTHGSFLIRESETSKGSYSLSVRDFDQNQGETVKHYKIRNMDNGGYYISPRVTFSSLHELVEYYSSSSDGLCTRLGKPCRTQKPQ

SEQ ID NO: 2864 - protein, 110 aa, Artificial Sequence
  Description of Artificial Sequence:  Synthetic peptide
KLIATTAHERMAWYHGTISRDEAERKLYSGAQPDGKFLMRERKENGTYALSVMYGKTVYHYKIDQDKSGKYSIPEGTKFDTLWQLVEYLKLKSDGIMAVLKESCPNSCTF

SEQ ID NO: 2865 - protein, 107 aa, Artificial Sequence
  Description of Artificial Sequence:  Synthetic peptide
SSARFDSSDRSGWYFGPVSRQEAQSRLQGQRHGVFLVRDSSTCPGDHVLSVSENSRVSHYIINSLPGRRYKIGDQEFDNLPALLDFYKIHYLDTTTLIEPAPRYPSP

SEQ ID NO: 2866 - protein, 110 aa, Artificial Sequence
  Description of Artificial Sequence:  Synthetic peptide
KRIAITAHERMVWFHGAITREGSEPRLQNGSRINGRFLVRQRDTNGSYALCLLHEGQVMHYRVDRDQAGKLSIPEGKKFDTLWQLVEHYSYKPDGLLHVLTEPCPRPDGD

SEQ ID NO: 2867 - protein, 105 aa, Artificial Sequence
  Description of Artificial Sequence:  Synthetic peptide
FIPAKYVRVDNDYMALNVSRLEAEELLMKNGGDGTFLIRFSETTRGDFTLSVKFGGGVQHFKVQRDGAGKYYLWVVKFNSLNQLVEYHRAESVSPLYDYTAEEEL

SEQ ID NO: 2868 - protein, 108 aa, Artificial Sequence
  Description of Artificial Sequence:  Synthetic peptide
KCEVPCERMHLMKLYMAPREDCGNLEEINCGGSGTKCACHLGTSAIFFLGEGRCRHYMIEMQPNARYVILGEDRAHASLTELVRYHQTVGIQPFMEILTVPCGQKSSE

SEQ ID NO: 2869 - protein, 108 aa, Artificial Sequence; identical to SEQ ID NO: 2629
  Description of Artificial Sequence:  Synthetic peptide

SEQ ID NO: 2870 - protein, 113 aa, Artificial Sequence
  Description of Artificial Sequence:  Synthetic peptide
WTDPALPLENQVWYHGAISRTDAENLLRLCKEASYLVRNSETSKNDFSLSLKSSQGFMHMKLSRTKEHKYVLGQNSPPFSSVPEIVHHYASRKLPIKGAEHMSLLYPVAIRTL

SEQ ID NO: 2871 - protein, 124 aa, Artificial Sequence
  Description of Artificial Sequence:  Synthetic peptide
VTPNEELHYSEPWFHGKLHTSGDEKPRVVAEEILNRYQQGDGTFLVRESETFKGDYSLSFWAMGKVNHCRIKSKLDRGQSKYFLVENMPFDSLYTLINHYRNVPLRSRDLEVRLMEPVPSPRPP

SEQ ID NO: 2872 - protein, 114 aa, Artificial Sequence
  Description of Artificial Sequence:  Synthetic peptide
NRSEEAELRKAPWFQAGIPREITLEVLSQEPEGAFMVRESTSKPGCYALSLRVPREFQPSGIAHYLIMRTNKGYKIKGFTKEFTTLTALITHHSVMPELLPCPLSLSRYNPSFV

SEQ ID NO: 2873 - protein, 108 aa, Artificial Sequence
  Description of Artificial Sequence:  Synthetic peptide
PCPQPQPHLNQPWFSATADKEKAEELLSLVPEDGAFLIRTSSTDSSVYVLSLKVDGEFWHYRLKRDGRIFVVNQKVFENLNQIVEFYANREFVRGISLRFPVNEKDIS

SEQ ID NO: 2874 - protein, 124 aa, Artificial Sequence
  Description of Artificial Sequence:  Synthetic peptide
VAPPRLLEEVAEQCHGPITLDFAINKLKTGGSLPGSYVLRRSPQDFDSYLLTVCVLTPLGPDYKGCLIRCDPTGTFSLAGLGRSHSSLRELLAACWNGGLHVDGVELYLTFCCNPRPKEKSNLI

SEQ ID NO: 2875 - protein, 129 aa, Artificial Sequence
  Description of Artificial Sequence:  Synthetic peptide
VAPSSVVQNLENGCHGPICTEYAIHKLRQEGNEEGTYVLRWSCTDYNYIIMTVVCIEMDLCESRPVPQYKNFQIETSPQGYRLYGTDTFRPTLKELLEHLQGQNLRTENLRFQPVLVGLGQPRKISNLL

SEQ ID NO: 2876 - protein, 113 aa, Artificial Sequence
  Description of Artificial Sequence:  Synthetic peptide
VDPNEDELRMAPWYWGRISREEAKSILHGKPDGSFLVRDALSMKGEYTLTLMKDGCEKLIKICHMDRKYGFIETDLFNSVVEMINYYKENSLSMYNKTLDITLSNPIVRARED

SEQ ID NO: 2877 - protein, 111 aa, Artificial Sequence
  Description of Artificial Sequence:  Synthetic peptide
AKATPETPSDQPWYFNGISRTQAQQLLLSPANAPGAFLIRPSESSIGGYSLSVRAQAKVCHYRICMAPSGGLYLQEGRLFPSLDALLAYYKTNWKLIQNPLLQPCVPQMPL

SEQ ID NO: 2878 - protein, 109 aa, Artificial Sequence
  Description of Artificial Sequence:  Synthetic peptide
MEINEQPFFHGLLPREEVKLLLQKNGDYLMRTSEPQGQARHLIISVMQNETSQEVAHYVIRTSDGAYSITDKIKFGTLTELVNHHKQAKISEEVASSVLVNPIGRQSWE

SEQ ID NO: 2879 - protein, 128 aa, Artificial Sequence
  Description of Artificial Sequence:  Synthetic peptide
INIKFVQDTSKYWYKPEITREQAICILKDREPGAFVIRDSNSFRGAYGLAMKVASPPPTVQQNKKVGDITNELVRHFLIETSAKGVRLKGCPNEPYFGCLSALVYQHAITPLALPCKLMIPTRDPNEE

SEQ ID NO: 2880 - protein, 109 aa, Artificial Sequence
  Description of Artificial Sequence:  Synthetic peptide
QGYADALNPLPECFYAVSRKEATEMLEKNPSLGNMILRPGSDSKNYSITIRQEIEMPRIKHFKVICTGKNYTIELEKPVTLPNLFSVIDYFVKETRGNLRPFIYSADDN

SEQ ID NO: 2881 - protein, 139 aa, Artificial Sequence
  Description of Artificial Sequence:  Synthetic peptide
SVAYIKRVIAHPNFHNISFNQAEKMMETLDQGDLIIRPSSKGENHLTVTWKVADGIYQHVDVKEEGKENAFSLGHTLWINTEEFEDLDEITARYIQPMASFARDLLGHKYFQECNGGSKEKMEELLVRTKREKPTFIPY

SEQ ID NO: 2882 - protein, 139 aa, Artificial Sequence
  Description of Artificial Sequence:  Synthetic peptide
ASTYVKRVIVHPSFQNITYKQAEKVMRESDVGDVIIRPSSKGADHLTVTWKVEDGVYQHIDVQEEGKDNDFSLGSTLKIGEEEFEDLDEIIARHIQPMAAFVRDVTSHKYYHAVEGGSKELMEKYLQTEKKKTPNRIPY

SEQ ID NO: 2883 - protein, 116 aa, Artificial Sequence
  Description of Artificial Sequence:  Synthetic peptide
FVAVERSVESEDWFFENVSRKEAGKLLLVDENPRGTFLVRPSEHNPRGYSLSVKDWEEGRGHHVKHYKIKPLDNGGFFIATNQTFPTLPALVMAYSKNALGLCHVLSKPCPKPQPD

SEQ ID NO: 2884 - protein, 113 aa, Artificial Sequence
  Description of Artificial Sequence:  Synthetic peptide
DVPPETRVEEERWFYPNMERKEAEEKCKNTGDYLIRYSSKQNRYVLTVCWAGQGKHFVIQEAPDEQTKTKYRFESRSFPSVRELLDFHVNSQTPVTKASGAILSRPILREDDK

SEQ ID NO: 2885 - protein, 126 aa, Artificial Sequence
  Description of Artificial Sequence:  Synthetic peptide
VSNSTELHSTEKWFHGKLGAGRDGRHIAERLLTEYCIETGAPDGSFLVRESETFVGDYTLSFWRNGKVQHCRIHSRQDAGSPKFFLTDNLVFDSLYDLITHYQEVPLRCNEFEMRLTEPVPQTNAH

SEQ ID NO: 2886 - protein, 114 aa, Artificial Sequence
  Description of Artificial Sequence:  Synthetic peptide
LVPDLEKITNSSFYWGKMDRYEAEHLLEGKPEGTFLLRDSAQEEFLFSVTFRKYGRSLHARIEQSGHKFSFDCHDPCVFTAPTVTGLLEHYKDPACVMFFEPCLTIPLHRRQTF

SEQ ID NO: 2887 - protein, 112 aa, Artificial Sequence
  Description of Artificial Sequence:  Synthetic peptide
LARVFSTVEECTWYWGGMSGQEAKRKLRGSSPGTFLLRDSADPRYLYSLSLMTKSGPTSIRIVYNNGRFRFDSERDDVTNESRQSQTRSDIDRRSCVVHMVLRYTSYLRQDR

SEQ ID NO: 2888 - protein, 109 aa, Artificial Sequence
  Description of Artificial Sequence:  Synthetic peptide
QDYADVLNPLPECFYAVSRKEATAMLEKNPSWGNMILRPGSDSKNYSITIRQEIEMPRIKHFKVTRTGNNYTIELEKPVTLPNLFSVIDYFVKETRGNLRPFIHSADDN

SEQ ID NO: 2889 - protein, 124 aa, Artificial Sequence
  Description of Artificial Sequence:  Synthetic peptide
FVAKANSLEPEPWFFKNLSRKDAERQLLAPGNTHGSFLIRESESTAGSFSLSVRDFDQNQGEVVKHYKIRNLDNGGFYISPRITFPGLHELVRHYTRYYNGHTKVAVKSLKQGSMSPDAFLAEA

SEQ ID NO: 2890 - protein, 109 aa, Artificial Sequence
  Description of Artificial Sequence:  Synthetic peptide
IPTSEKPLGEQEWYHGAIPRTEAQELLKQQGDFLVRESHGKPGEYVLSVFSDGQRRHFIIQFADNQYRFEGTGFPTIPQLIDHHYTTKQVITKKSGVVLLNPVIKDKKW

SEQ ID NO: 2891 - protein, 109 aa, Artificial Sequence
  Description of Artificial Sequence:  Synthetic peptide
ISVGERPLAEHDWYHGAIPRIEAQELLKQQGDFLVRESHGKPGEYVLSVYSDGQRRHFIIQFVDNLYRFEGTGFSNIPQLIDHHFNTKQVITKKSGVVLLNPIPKDKKW

SEQ ID NO: 2892 - protein, 110 aa, Artificial Sequence
  Description of Artificial Sequence:  Synthetic peptide
MDTFDVSDRNSWYFGPMSRQDATEVLMNERERGVFLVRDSNSIAGDYVLCVREDTKVSNYIINKVQQQDQIVYRIGDQSFDNLPKLLTFYTLHYLDTTPLKRPACRRVEK

SEQ ID NO: 2893 - protein, 113 aa, Artificial Sequence
  Description of Artificial Sequence:  Synthetic peptide
CVPKPVDYSCQPWYAGPMERLQAETELINRVNSTYLVRHRTKESGEYAISIKYNNEAKHIKILTRDGFFHIAENRKFKSLMELVEYYKHHSLKEGFRTLDTTLQFPYKEPEQP

SEQ ID NO: 2894 - protein, 110 aa, Artificial Sequence
  Description of Artificial Sequence:  Synthetic peptide
VHDHLKDLWNDGRIMGFVSRSEERRLLKKMVSGTFLLRFSETSEGGITCSWVEHQDDDKVLIYSVQPYTKEVLQSLPLTEIIRHYQVLAEENAPENPLRFLYPRVPRDEA

SEQ ID NO: 2895 - protein, 113 aa, Artificial Sequence
  Description of Artificial Sequence:  Synthetic peptide
RIDPALPLESQCWYHGAISRTDAETLLRLCKEASYLVRNSETSKNDFSLSLKSSQGFMHMKLSRTQENKYVLGQHSPPFDSVPEIIHHYASRKLPIKGAEHMSLLYPVAIRTL

SEQ ID NO: 2896 - protein, 106 aa, Artificial Sequence
  Description of Artificial Sequence:  Synthetic peptide
ERPAIIAPPESEWYHGRLDRYSAESRLRGSSKLGSYLVRESDRKPGSYVLSYYGRTGINHFRITAVCGDFYIGGRQFISLSDLVGYYTSCSDLLKRERLAIPVAPP

SEQ ID NO: 2897 - protein, 126 aa, Artificial Sequence
  Description of Artificial Sequence:  Synthetic peptide
VIVKFVQDTSKFWYKADISREQAIAMLKDKAPGSFIVRDSHSFRGAYGLAMKVATPPPSTEPYSGDLSNELVRHFLIECTPKGVRLKGCSNEPYFGSLTALVCQHSITPLALPCKLLIPERDPLEE

SEQ ID NO: 2898 - protein, 109 aa, Artificial Sequence
  Description of Artificial Sequence:  Synthetic peptide
TKEEVRRAAEVPWCFLQVSRLEAQLLLERYPECGNLLLRPGGDGKDSVSVTTRQILNGSPVVKHYKVKRAGSKYVIDVEDPFSCPSLEAVVNYFVTHTKRALVPFLLDE

SEQ ID NO: 2899 - protein, 134 aa, Artificial Sequence
  Description of Artificial Sequence:  Synthetic peptide
YKLPPASTTREQWYHGTQTRDEAVATLTQYAKELLAKQPGVDTSGCFLVRYSESPAASGLVLTLLSDQVVKNFRISQAYLYTNGVKVQSDEQKFVFIDDGPYWPSLEHLIANFMRFSYGLPVSLKYAVPPKPKP

SEQ ID NO: 2900 - protein, 129 aa, Artificial Sequence
  Description of Artificial Sequence:  Synthetic peptide
VAPPLIVHNIQNGCHGPICTEYAINKLRQEGSEEGMYVLRWSCTDFDNILMTVTCFEKSEQVQGAQKQFKNFQIEVQKGRYSLHGSDRSFPSLGDLMSHLKKQILRTDNISFMLKRCCQPKPREISNLL

SEQ ID NO: 2901 - protein, 108 aa, Artificial Sequence
  Description of Artificial Sequence:  Synthetic peptide
GPSHTGLFAGKDWYYGSVTRHQAECALNERGVEGDFLVRDSESSPSDFSVSLKAVGKNKHFKVQLSNEVYCIGQRRFNSMDELLEHYKKAPIFTSEHGEKLYLIKPLQ

SEQ ID NO: 2902 - protein, 119 aa, Artificial Sequence
  Description of Artificial Sequence:  Synthetic peptide
YVAPVDSIQAEEWYFGKIGRKDAERQLLSPGNPRGAFLIRESETTKGAYSLSIRDWDQTRGDHVKHYKIRKLDTGGYYITTRAQFHSVQELVQHYMGMWNGSTKVAVKTLKPGTMSPKA

SEQ ID NO: 2903 - protein, 116 aa, Artificial Sequence
  Description of Artificial Sequence:  Synthetic peptide
QVDQLTCEGVPEWFHGAISREDAENLLESQPLGSFLIRVSHSHVGYTLSYKAQNCCHHFMVKLLDDGSFTIPGEERVHDSLDALVTFYQQQPLRPHGDLLMQSCPQRDPVNVDYED

SEQ ID NO: 2904 - protein, 110 aa, Artificial Sequence
  Description of Artificial Sequence:  Synthetic peptide
IPSNYIEMKNHDWYYGRITRADAEKLLSNKHEGAFLIRISESSPGDFSLSVKCPDGVQHFKVLRDAQSKFFLWVVKFNSLNELVEYHRTASVSRSQEVKLRDMIPEEMLV

SEQ ID NO: 2905 - protein, 116 aa, Artificial Sequence
  Description of Artificial Sequence:  Synthetic peptide
VTATSNSLEIYEWYSKNITRSQAEQLLKQEGKEGGFIVRDSTSKTGKYTVSVYAKSAVDPQGMIRHYVVCCTPQNQYYLAEKHLFNTIPELITYHQHNSAGLISRLKYPVSRHQKS

SEQ ID NO: 2906 - protein, 116 aa, Artificial Sequence
  Description of Artificial Sequence:  Synthetic peptide
IPSNYTAKLYNRWQFVGLSKRKSEELLMLPHNQPGSFLIRESETFPGNYTLSVRKSGSQERASVKHYRISCIDNGWFYISPGLTFRTLSDMIAHYSEVSDGLCCTLGEPCFIIGSN

SEQ ID NO: 2907 - protein, 107 aa, Artificial Sequence
  Description of Artificial Sequence:  Synthetic peptide
MEFPFFHGKISRKACEDLLCKKGKNGSYLIRESETVAGALCLCVLFEKVIYTYRIFREYEGCYKVQTSEGVPQKVFKTLKDLIYNYEKPNQGLVTKLRYPVKKTSSS

SEQ ID NO: 2908 - protein, 116 aa, Artificial Sequence
  Description of Artificial Sequence:  Synthetic peptide
IPSVYVAKVSHGWLYEGLSREKAEELLLLPGNPGGAFLIRESQTRRGCYSLSIRLSRPASWDRIRHYRIQRLDNGWLYISPRLTFPSLHALVEHYSELADGICCALREPCVLQKLG

SEQ ID NO: 2909 - protein, 116 aa, Artificial Sequence
  Description of Artificial Sequence:  Synthetic peptide
IPSVHVAKVSHGWLYEGLSREKAEELLLLPGNPGGAFLIRESQTRRGSYSLSVRLSRPASWDRIRHYRIHCLDNGWLYISPRLTFPSLQALVDHYSELADDICCLLKEPCVLQRAG

SEQ ID NO: 2910 - protein, 116 aa, Artificial Sequence
  Description of Artificial Sequence:  Synthetic peptide
IPSIHVARIAHGWLYEGLSREKAEELLLLPGNHGGAFLIRESQTRRGCYSLSVRLSRPASWDRIKHYRIQRLDNGWLYISPRLTFPSLLALVDHYSELADDICCLLKEPCALRRAG

SEQ ID NO: 2911 - protein, 117 aa, Artificial Sequence
  Description of Artificial Sequence:  Synthetic peptide
IPTTYAAKVTHTWLFAGVSRSKAVELLMLPNNRNGAFLIRESETSADCYSLSILRRSGSPCMDSVKHYRICCLQNGWVYISPGLTFPSLHHLVEHYSESAGGLCCRLTAPCFIKSSD

SEQ ID NO: 2912 - protein, 110 aa, Artificial Sequence
  Description of Artificial Sequence:  Synthetic peptide
IPCNHVSKVYHGWLFEGVSRQKAEELLSLPGNSAGSFLIRESPRERGLYSLSVRHRSVKHYKIFRLTNSWYYISPRLTFQCLEDMVNHYSDSSDGICCVLSAPCLALSNP

SEQ ID NO: 2913 - protein, 115 aa, Artificial Sequence
  Description of Artificial Sequence:  Synthetic peptide
IPSVHVAKVSHGWLYEGLSREKAEELLLLPGNPGGAFLIRESQTRRGSYSLSVRLSRPASWDRIRHYRIHCLDNGWLYISPRLTFPSLQALVDHYSEGWPAPWQGYTPTCDCAED

SEQ ID NO: 2914 - protein, 110 aa, Artificial Sequence
  Description of Artificial Sequence:  Synthetic peptide
IPGICVARVYHGWLFEGLGRDKAEELLQLPDTKIGSFMIRESETKKGFYSLSVRHRQVKHYRIFRLPNNWYYISPRLTFQCLEDLVTHYSEVADGLCCVLTTPCLAQNTP

SEQ ID NO: 2915 - protein, 140 aa, Artificial Sequence
  Description of Artificial Sequence:  Synthetic peptide
YVAPSDSIQAEEWYFGKITRRESERLLLNAENPRGTFLVRESETTKGTSALAGQRILSLLPPPPCPPLSLLHAVSHCPPFSAAGWYGGGCPEEPQRRHTLRGREAPGQKTRLTAPPASSSEHADGLCHRLTTVCPTSKPQ

SEQ ID NO: 2916 - protein, 108 aa, Artificial Sequence
  Description of Artificial Sequence:  Synthetic peptide
FKRHIEPLWYSGLIYGLITKSECNSYLTTLPEGSFLIRFSDSVPGAFAVAYVTNDESDRVKHYLVKPDDIGANKTLPDFLRERHQFKTLYQVDPSKRSLHPKSKDAEL

SEQ ID NO: 2917 - protein, 120 aa, Artificial Sequence
  Description of Artificial Sequence:  Synthetic peptide
VLSNDELHFGENWFHGKLSGGREEAEKLLQQFSHLGDGTFLVRESVTFVGDYCLSFWRQGKPNHCRIKLKQDKGVTKYYLMENVLFESLYSLIMYYRQNALRSAEFYITLKEPVPQPNKH

SEQ ID NO: 2918 - protein, 109 aa, Artificial Sequence
  Description of Artificial Sequence:  Synthetic peptide
DRPAITAPPESEWYHGRLDRYSAEQRLKSTTKLGSYLVRESDRKPGSYVLSYLGRTGINHFRITAVCGDFYIGGRQFFSLSDLVGYYTSCSDLLKRERLVQPVPPPEPV

SEQ ID NO: 2919 - protein, 110 aa, Artificial Sequence
  Description of Artificial Sequence:  Synthetic peptide
PPSNHSPPRMPRWYHGKLDRTIAEERLRQARNPGSYLIRESDRRPGSFVLSFLSMTNVVNHFRIIAMCGDYYIGGRRFSSLSDLIGYYSYVSCLLKGEKLLSPVAPPEPV

SEQ ID NO: 2920 - protein, 126 aa, Artificial Sequence
  Description of Artificial Sequence:  Synthetic peptide
HVRFVKDLSAWWYKPSITRDDAINILKDRPPGTFIVRDSNSFPGAFGLALKVAQVPANTTPRKGGDPQSELVRHFLIEPNARGVRLKGCVNEPVFSSLSALIYQHTLTQLALPIKLVLPDMDSTGA

SEQ ID NO: 2921 - protein, 126 aa, Artificial Sequence
  Description of Artificial Sequence:  Synthetic peptide
SNVKFVQDTSKFWYKPHLSRDQAIALLKDKDPGAFLIRDSHSFQGAYGLALKVATPPPSAQPWKGDPVEQLVRHFLIETGPKGVKIKGCPSEPYFGSLSALVSQHSISPISLPCCLRIPSKDPLEE

SEQ ID NO: 2922 - protein, 126 aa, Artificial Sequence
  Description of Artificial Sequence:  Synthetic peptide
LTAELKKLAKQGWYWGPITRWEAEEKLTNLPDGSFLVRDSSDDRYLLSLSFRSQTKTLHTRIEHSNGSFSFYEQPDIEGHVSIVDLIDNSVKDSENGAFCYSRSRLPGSATYPVRLTNPVSRFMQV

SEQ ID NO: 2923 - protein, 120 aa, Artificial Sequence
  Description of Artificial Sequence:  Synthetic peptide
IAKTFSYLRESGWYWGSITASEARQHLQKMPEGTFLVRDSTHPSYLFTLSVKTTRGPTNVRIEYADSSFRLDSNCLSRPRILAFPDVVSLVQHYVASCTADTRSDSPDPAPTPALPVPKP

SEQ ID NO: 2924 - protein, 123 aa, Artificial Sequence
  Description of Artificial Sequence:  Synthetic peptide
FADQEAELHGKPWYAGACDRKSAEEALHRSNKDGSFLIRKSSGHDSKQPYTLVAFFNKRVYNIPVRFIEATKQYALGKKKNGEEYFGSVVEIIKNHQHNPLVLIDSQNNTKDSTRLKYAVKVS

SEQ ID NO: 2925 - protein, 103 aa, Artificial Sequence
  Description of Artificial Sequence:  Synthetic peptide
DSRPADISAEDVWYHGELNEHDANRLLQGTTPGAFLVRQTGPTRFYLSILDNDGYPKHIPIRQLTTPHYFFEGKRYEKLREIVEAFKSALFPIRKGGIMPLNG

SEQ ID NO: 2926 - protein, 110 aa, Artificial Sequence
  Description of Artificial Sequence:  Synthetic peptide
VEDYVDVLSPMPVCFYSVSRKEATEMLEKNPSLGNMILRPGSDSKSYSITIRQEIDLPRIKHYKVMSVGKNYTIELERPVTLPNLFSVIDYFMKETRGNLRPFIYSTDET

SEQ ID NO: 2927 - protein, 110 aa, Artificial Sequence
  Description of Artificial Sequence:  Synthetic peptide
SPLSLPLVGEIPACFRPVSRIEAEVLLERHPDCGNMLLRPGRDGSSLAVTTRQDLNGSVFRHYRVTQKQQGGYIIDVENPIPCPTLHDVINALVEKTAGTLQPFILEEPY

SEQ ID NO: 2928 - protein, 109 aa, Artificial Sequence
  Description of Artificial Sequence:  Synthetic peptide
AKEEARRALETPSCFLKVSRLEAQLLLERYPECGNLLLRPSGDGADGVSVTTRQMHNGTHVVRHYKVKREGPKYVIDVEQPFSCTSLDAVVNYFVSHTKKALVPFLLDE

SEQ ID NO: 2929 - protein, 118 aa, Artificial Sequence
  Description of Artificial Sequence:  Synthetic peptide
DSRPADISAEDVWYHGELNEHDANRLLQGTTPGAFLVRQTGPTRFYLSILDNDGYPKHIPIRQLTTPHYFFEGKRYEKLREIVEAFKSALFPIRKGGIMPLNGEIVEIKYLCIRSFEK

SEQ ID NO: 2930 - protein, 95 aa, Artificial Sequence
  Description of Artificial Sequence:  Synthetic peptide
MSREEAEKLVRTQGEFLLRKTESTKRGEVVVLSVFWDDTANHLVVEKANNGSSYYLKEFCFENISDLVRYHHQTRASVYKSGIKLFSWVIREEWQ

SEQ ID NO: 2931 - protein, 121 aa, Artificial Sequence
  Description of Artificial Sequence:  Synthetic peptide
DEYIKSFLLQRNWYHGMMFGKAAEKLLKWESSYIVRRSMGPTHKFLCITARVEDKYFHFQFNWNSEGWSCPILYEKFPRIPVKRYEHIYQLLDAWSLVVNQLVPISRCSMILQHSSIALEN

SEQ ID NO: 2932 - protein, 128 aa, Artificial Sequence
  Description of Artificial Sequence:  Synthetic peptide
VAPPLIVHNIQNGCHGPICTEYAINKLRQEGSEEGMYVLRWSCTDFDNILMTVTCFEKSEVSHCLKQFKNFQIEVQKGRYSLHGSDRSFPSLGDLMSHLKKQILRTDNISFVLKRCCQPKPREISNLL

SEQ ID NO: 2933 - protein, 113 aa, Artificial Sequence
  Description of Artificial Sequence:  Synthetic peptide
EDYIRSHLINLHVYHGVLFGSEAEKLLTWDRAYLVRRAITKPNKFLCISVNWKNKIFHYQLDFNEDGWCCKKLYEKFPTMPNRRFLHIRQLLEAWSQATPFLIPTPRGSNVLI

SEQ ID NO: 2934 - protein, 124 aa, Artificial Sequence
  Description of Artificial Sequence:  Synthetic peptide
VAPPRLLEEEAELCHGPITLDFAIHKLKAAGSLPGTYILRRSPQDYDSFLLTACVQTPLGPDYKGCLIRQDPSGAFSLVGLSQPHRSLRELLAACWNSGLRVDGAALNLTSCCAPRPKEKSNLI

SEQ ID NO: 2935 - protein, 118 aa, Artificial Sequence
  Description of Artificial Sequence:  Synthetic peptide
YVVPADSIQAEEWYFGKMGRKDAERLLLNAGNQRGIFLVRESETTKGAYSLSIRDWDEVRGDNVKHYKIRKLDNGGYYITTRAQFDTLQKLVKHYTEHADGLCHKLTTVCPTVKPQTQ

SEQ ID NO: 2936 - protein, 108 aa, Artificial Sequence
  Description of Artificial Sequence:  Synthetic peptide
PRLNFEPLHHMGWFYSNMSRAEAEDCLLRIPRDGAFLIRKRNERDTFALSIRSEGDIKHYKIFRKSSKYVLADAYEFFSLEDMVSCFRNQQFAGKTKLRYPVTPQLVE

SEQ ID NO: 2937 - protein, 116 aa, Artificial Sequence
  Description of Artificial Sequence:  Synthetic peptide
IPSSHVAKISHGWLYEGLSREKAEELLLLPGNPGGAFLIRESQTRTGCYSLSVRLSRPASWDRIRHYRIQHLDNGWLYISPRLTFPSLQALVDHYSELADDICCLLKEPCALRRAG

SEQ ID NO: 2938 - protein, 116 aa, Artificial Sequence
  Description of Artificial Sequence:  Synthetic peptide
LPTNYVAKVCNRWLYKGINREKAEELLMVNSNRSGSFLIRESETRSGSYTLSIRKTNHTSRDSIKHYRIHQLDNGWFYIAPRLTFATLQDMVDYYSEVADGICCTLTEPCVVQRVP

SEQ ID NO: 2939 - protein, 108 aa, Artificial Sequence
  Description of Artificial Sequence:  Synthetic peptide
IPHCHATKVYHGWLFENLSRPKAEDLLRLPGNRVGSFLIRESSKGIYSLSVRHRTIKHYRIVRMPNNWYYISARLTFQCLEDLVNHYSDIADGLCCVLTGPCLTACET

SEQ ID NO: 2940 - protein, 114 aa, Artificial Sequence; identical to SEQ ID NO: 2792
  Description of Artificial Sequence:  Synthetic peptide

SEQ ID NO: 2941 - protein, 113 aa, Artificial Sequence
  Description of Artificial Sequence:  Synthetic peptide
LLPGAIPPESTNYFYGKITREQAEELLFTNGANEGLFLLRESVNRNYAVSICHLGRVHHYNVERHTDCSYRIQTGHKFIGPVELVQHHSTQLDGFLTLAQLPLNRPVGMSPIV

SEQ ID NO: 2942 - protein, 113 aa, Artificial Sequence
  Description of Artificial Sequence:  Synthetic peptide
VVNAVRKLQESGFYWSTVTGGEANLLLSAEPAGTFLIRDSSDQRHFFTLSVKTQSGTKNLRIQCEGGSFSLQSDPRSTQPVPRFDCVLKLVHHYMPAAGAPSFSQPPAEPSSS

SEQ ID NO: 2943 - protein, 110 aa, Artificial Sequence
  Description of Artificial Sequence:  Synthetic peptide
VVNTVRKLQESGFYWSTVTGGEANVLLSAEPAGTFLIRDSSDQRHFFTLSVKTESGTKNLRIQCEGGSFSLQSDPRSSQPVPRFDCVLKLVHHYMPPTPCAGPKQPGGAL

SEQ ID NO: 2944 - protein, 109 aa, Artificial Sequence; identical to SEQ ID NO: 2890
  Description of Artificial Sequence:  Synthetic peptide

SEQ ID NO: 2945 - protein, 110 aa, Artificial Sequence
  Description of Artificial Sequence:  Synthetic peptide
NGQEESELSFKKNSILKVTRDGAEELLKNDGDGAFLIRESEGTPGDYSLSVKFVDGVQHFKVLRDGAGKYFLWVVKFNSLNQLVEYHRTSSVSRSQTIYLKDRKSESIHL

SEQ ID NO: 2946 - protein, 109 aa, Artificial Sequence; identical to SEQ ID NO: 2742
  Description of Artificial Sequence:  Synthetic peptide

SEQ ID NO: 2947 - protein, 108 aa, Artificial Sequence
  Description of Artificial Sequence:  Synthetic peptide
PVPQPLSHEGKDWFHKKLSRPQAEEMLKRVHQDGSFLVRKREQGDDSYAISFRAEGKIKHCRINQEGRLFAIGNAHFESIVELVSYYEKFPLYRKMKLKYPVNQEIVD

SEQ ID NO: 2948 - protein, 110 aa, Artificial Sequence
  Description of Artificial Sequence:  Synthetic peptide
YVAEDKSIKAEEWFFGAIKRAESEKLLRAAGEKGTFLVRESESKPGDYSLSIQDGDNVKHYRIRKLDEGGFFITRRAVFNTLKDLVQYYQNESDGLCVNLRQPCRALERP

SEQ ID NO: 2949 - protein, 113 aa, Artificial Sequence
  Description of Artificial Sequence:  Synthetic peptide
RVDPMLPLEKQVWYHGALTRSEAESLLTLCKECSYLVRKSQTSRNDYSLSLRSCHGFMHMKFSQSRDGKFILGENSPPFDSIPEVIHFYTTNKLPIRGAEHLSLLFPVLVQTL

SEQ ID NO: 2950 - protein, 122 aa, Artificial Sequence
  Description of Artificial Sequence:  Synthetic peptide
DTPPTELHFGEEWFHKKVEKRTSAEKLLQEYCAETGGKDGTFLVRESKTFPNDYTLSFWRSGRVQHCRIRSTVEGGTMKYFLTDNVMFTSIYALIQHYRETHLRCAEFELRLTDPVPNPNPH

SEQ ID NO: 2951 - protein, 116 aa, Artificial Sequence
  Description of Artificial Sequence:  Synthetic peptide
LVPDLLQINNNPCYWGVMDKYAAEALLEGKPEGTFLLRDSAQEDYLFSVSFRRYSRSLHARIEQWNHNFSFDAHDPCVFHSPDITGLLEHYKDPSAWEGESGRRRCARRFLFRRQE

SEQ ID NO: 2952 - protein, 122 aa, Artificial Sequence
  Description of Artificial Sequence:  Synthetic peptide
YVAPSDSIQAEEWFFAKITRRDSERMLLALENRRGTFVVRESETTKGAYCLSVLDCDNTRGLNVKHYKIRKLDSGGFYITSRTPFATLQQLVQSYGKHADGLCHTLTDVCPVLKPQTQGLSK

SEQ ID NO: 2953 - protein, 109 aa, Artificial Sequence
  Description of Artificial Sequence:  Synthetic peptide
AVPQPSPHLNEGWFYSDLSRGQAEDYLMRIPRDGAFLIRQREGEPDSFAITFKGDGKVKHCRIQKEGTRYLLGTTTYFESLVELVSYFRNRPLYRKIKLRYPVTPELVE

SEQ ID NO: 2954 - protein, 108 aa, Artificial Sequence
  Description of Artificial Sequence:  Synthetic peptide
YVPKPDTHQLEGWFYSNLSRGEAEDYLMRIPRDGAFLIRQREDSDSYAITFRGEGLVKHCRIHKDGSMYILGTSSEFDSLVELVDYFRKKPLYRKTKLRYPVTPELVE

SEQ ID NO: 2955 - protein, 116 aa, Artificial Sequence
  Description of Artificial Sequence:  Synthetic peptide
FVALVDSLEQEKWFFKTLSRKDAERLLLSSGNKVGSFLVRESETSTGAYSLSVRDSDSAHGDIIKHYRIRSLDGGGYYISPRMTFATLPELIHHYSQRGDGLCQRLMAPCTSLAPQ

SEQ ID NO: 2956 - protein, 110 aa, Artificial Sequence
  Description of Artificial Sequence:  Synthetic peptide
IPSNYIEMKNHDWYYGRITRADAEKLLSNKHEGAFLIRISESSPGDFSLSVKCSDGVQHFKVLRDAQGKFFLWVVKFNSLNELVDYHRTASVSRSQDVKLRDMVPEEMLV

SEQ ID NO: 2957 - protein, 111 aa, Artificial Sequence
  Description of Artificial Sequence:  Synthetic peptide
YVAPLASYEAEDWYFGDVGRAEAEKWLLAPGTQSGAFLVRASSTQKNSLSLSLRDGEGIKHYRIRTLDNGGFFIANRISFPTLQDLVAHYMMDSDGLAQRLAMPCSRANIP

SEQ ID NO: 2958 - protein, 113 aa, Artificial Sequence; identical to SEQ ID NO: 2349
  Description of Artificial Sequence:  Synthetic peptide

SEQ ID NO: 2959 - protein, 114 aa, Artificial Sequence; identical to SEQ ID NO: 2753
  Description of Artificial Sequence:  Synthetic peptide

SEQ ID NO: 2960 - protein, 111 aa, Artificial Sequence; identical to SEQ ID NO: 2655
  Description of Artificial Sequence:  Synthetic peptide

SEQ ID NO: 2961 - protein, 114 aa, Artificial Sequence
  Description of Artificial Sequence:  Synthetic peptide
LIDASIPLDRQGWYHGSISRIDAEKILRPLSEGSFLVRNSESTRQDYSLTLKSAKGFMHMRIQRDADSGQFILGQFSRPFPTIPDMIRHFCLNRLPVRGAEHMCLLEPVIAQIL

SEQ ID NO: 2962 - protein, 112 aa, Artificial Sequence
  Description of Artificial Sequence:  Synthetic peptide
RVDPTIPLEKQIWYHGAISRSDAENLLRLCKECSYLVRNSQTSKHDYSLSLKSNQGFMHMKLAKTKEKYVLGQNSPPFDSVPEVIHYYTTRKLPIKGAEHLSLLYPVAVRTL

SEQ ID NO: 2963 - protein, 126 aa, Artificial Sequence
  Description of Artificial Sequence:  Synthetic peptide
VSTNIELHLAQDWFHSKLGEGRVGWHMAEWLLTEYCTEMGDPDGSFLVRESGTFVGDYVLSLWCNEKVQHCCIHWWQDASISRFFLTDNWVFDSLFNFITRYRETLPGYNKLEMRLTEAVPRSNTH

SEQ ID NO: 2964 - protein, 117 aa, Artificial Sequence
  Description of Artificial Sequence:  Synthetic peptide
LAEEQRRTQLYRWWHGNLPASSANKLLQNEKNGTYLLRASQHIPGAMVISAKTEGHVVHLTIYQDHLTGKYNIDGDRAKFNTAWILIDSYSKNPIVEKGEASRVLYLEEPLFNTFIE

SEQ ID NO: 2965 - protein, 112 aa, Artificial Sequence
  Description of Artificial Sequence:  Synthetic peptide
SKTDSMETNEQPWFHGLLPREEVQLLLLKNGDFLVRMSEPSSGQARHLILSVMQNESSQEAMHYVIRNADGKFSITGKENFDSLIELINHHKQNKLHEDNPKSVLINAIGRQ

SEQ ID NO: 2966 - protein, 133 aa, Artificial Sequence
  Description of Artificial Sequence:  Synthetic peptide
PPSNHSPPRMPRWYHGKLDRTIAEERLRQARNPGSYLIRESDRRPGSFVLSFLSMTNVVNHFRIIAMCGDYYIGGRRFSSLSDLIGYYSYVSCLLKGEKLLSPVAPPEPVEDRRRVRAILPYTKVPDTDEIRQ

SEQ ID NO: 2967 - protein, 114 aa, Artificial Sequence
  Description of Artificial Sequence:  Synthetic peptide
KRTHEQTLAKEPWYHGLLPREDMKVLLTQRGDFLVRFTDPKVGEPRKFVLSIYVGVADEIRHYVIQEYENKFAVDAKWFASIPDLLNYHHRTKEPVAIGVESVLIRPIGREPWE

SEQ ID NO: 2968 - protein, 132 aa, Artificial Sequence
  Description of Artificial Sequence:  Synthetic peptide
VQHTIRMLQESGFYWGAISGKEANHLLSSEPSGTFLVRDSSDNRHFFTLSVKTESGTKNLRVQCDNKSFFLQTDSKSMQSVPRFDCVLRLVQHYMPRSALSIGIPRSSYYIYTGGEKIPLELLRPLQCSMSS

SEQ ID NO: 2969 - protein, 130 aa, Artificial Sequence
  Description of Artificial Sequence:  Synthetic peptide
VETALERLEASGYYWSTLSGTEAKKLLSDQPVGSFLIRDSSDHHHLFTLSLRTSAGITNLRIKLEGPSFYLETVAGAESPHTFPCVVKLVEHYMRLTAAGESDSNLCYIEGNDQPVPLMLTQPLNCKVVS

SEQ ID NO: 2970 - protein, 105 aa, Artificial Sequence
  Description of Artificial Sequence:  Synthetic peptide
VRKTYVQLLHSDYYWRSMTMEEAHRALAHAQLGAFLIRDSGQPDVFFTLSYQSEDGPTSIRIQLNNLLFSLCGSHRTFASLFSLLAYYTRSSCKLTTPYRQQRPE

SEQ ID NO: 2971 - protein, 114 aa, Artificial Sequence
  Description of Artificial Sequence:  Synthetic peptide
ITRTSALLDACGFYWGPLSVHGAHERLRAEPVGTFLVRDSRQRNCFFALSVKMASGPTSIRVHFQAGRFHLDGNRETFDCLFELLEHYVAAPRRMLGAPLRQRRVRPLQELCRQ

SEQ ID NO: 2972 - protein, 117 aa, Artificial Sequence
  Description of Artificial Sequence:  Synthetic peptide
LERSLNILQASDFYWGPLSVGEAHAKLQREPVGTYLVRDSSQGNCLFSLSVRMPTGPVSLRISFQEGYFRLKNWFSDCVVRLLELVVAGTRNNPLHFDEMGGTPLVFSEPLCRSRRT

SEQ ID NO: 2973 - protein, 137 aa, Artificial Sequence
  Description of Artificial Sequence:  Synthetic peptide
APASGAVRPSCRWFHPNISRVEAEKLFLSRGQRGDFLARPSESSPGGFTLSVRWYHGRLSGKEAEKLLLQKGHPGSFLVHMSQSDPGGFPLSALTQGWDEAQGSGRQPQVTHIMTHSQMLQQQECRFLYPRKEGQSV

SEQ ID NO: 2974 - protein, 108 aa, Artificial Sequence
  Description of Artificial Sequence:  Synthetic peptide
ACPQPQPHLNQPWFSATADKEKAEELLSLIEEDGAFLIRTSSQDSSVFVLSLKVDGEFWHYRLKRDGRIFVVNQKVFENLNQIVEFYANREFVRGISLRYPVNEKDIS

SEQ ID NO: 2975 - protein, 112 aa, Artificial Sequence
  Description of Artificial Sequence:  Synthetic peptide
SLLERLLRSHPVWFLPGIQRSGAIHLLQGKEEGTFIVRGSSQSKTMAVSVRLPANAGPYIEHYLIQSNNGQLSLESSRFKFDSIPALIAHYTQCCDELPVQLCLPVALREAK

SEQ ID NO: 2976 - protein, 120 aa, Artificial Sequence
  Description of Artificial Sequence:  Synthetic peptide
LKISENDECKAELCHVAISPDSVEKVLEMYNKEDGTFLIRESRSSENSYTLSLCHNQRIKNFRISRDTDGSLSLKDPAGSTAEQPIKSFPSMAALVEHHKTEKDGLPTHLKINCSPKEVA

SEQ ID NO: 2977 - protein, 113 aa, Artificial Sequence [sequence omitted]

SEQ ID NO: 2978 - protein, 122 aa, Artificial Sequence
  Description of Artificial Sequence:  Synthetic peptide
TTNGFDPFEWRSFYFPGMSREEAHKLLGEPQVSIGTFLMRDSSRPGEYSLTVREADEGNAVCHYLIERGEPKEDGTAAAGVKIANQSFPDIPALLNHFKMRVLTEASLLAAYKKPIIEVVVG

SEQ ID NO: 2979 - protein, 103 aa, Artificial Sequence
  Description of Artificial Sequence:  Synthetic peptide
ESKRRRPSDSEIYMEQNMNRVEAEKRLENRNLGDYLLRSRGEGSAALSLRATKGVVHIKIEWNGEKWVIGEGPLFRSISSAISFYRRHPLPIRGADHLVLKNQ

SEQ ID NO: 2980 - protein, 107 aa, Artificial Sequence
  Description of Artificial Sequence:  Synthetic peptide
LINGMWRSASPKWIEGFVTKEEAERSLQNQVPGTFILRFPTSRSWPHPDAGSVVVTYVGHDLVIHHRLLTINHICDSSERYTDAKQLQDMLLAEPELSRLGRIIRGI

SEQ ID NO: 2981 - protein, 108 aa, Artificial Sequence
  Description of Artificial Sequence:  Synthetic peptide
LFLHYQQLQNEPWFHGPLSRRQAERLLTKDGDFLVRESGTTPGQYVLTGQQGGQPKHLLLVDPEGVVRTKDHRFESVSHLISYHMDNRLPIISAGSEVCLQQPVDRKA

SEQ ID NO: 2982 - protein, 117 aa, Artificial Sequence
  Description of Artificial Sequence:  Synthetic peptide
GSEGDQPLSGYPWFHGMLSRLKAAQLVLTGGTGSHGVFLVRQSETRRGEYVLTFNFQGKAKHLRLSLNEEGQCRVQHLWFQSIFDMLEHFRVHPIPLESGGSSDVVLVSYVPSSQRQ

SEQ ID NO: 2983 - protein, 116 aa, Artificial Sequence
  Description of Artificial Sequence:  Synthetic peptide
ASSNPILLPVESWDFGKYSCEDAEKKLMAIGINKGQFIVRDNRDPGTFSLSVRDNDPQKGDHVKHYRILEMVGGNGIFIFEGSIFRTLSELVHHYQMNSEGLCCSLTKACPQEEPN

SEQ ID NO: 2984 - protein, 123 aa, Artificial Sequence
  Description of Artificial Sequence:  Synthetic peptide
SLSCERALSVKLWFVGEMGRDTASNKLEPREDGTYMLRVRPAGQPRLKHETNYALSIKADGAVKHIRVFKRDVDGADVYYLSESRFFKSVVELVEYYERASLSENFEKLDQRLLWPYRRVLAK

SEQ ID NO: 2985 - protein, 123 aa, Artificial Sequence
  Description of Artificial Sequence:  Synthetic peptide
EVKRTELHLKEKWFHGKMKEGRTTAEKLLQEYCAEMGGKDGTFLVRESEAFPNDCTLSFWRSGRVQHCRIRSSSDGDTVKYYLTDNVTFDSIYDLIQHYKEVHLRCAEFDLRLTDAVPNPSPH

SEQ ID NO: 2986 - protein, 118 aa, Artificial Sequence
  Description of Artificial Sequence:  Synthetic peptide
DASNHKELKEKPYYVGMLERDQARRILEQSTAGQFLVRDRAGDDVHQAPYAVSMVTREQKQRHMKIFKEQTSKFPHPKYFFCEQLKYSSPVELINAFSFEKDLNEAFNDLTGPGRIPA

SEQ ID NO: 2987 - protein, 116 aa, Artificial Sequence
  Description of Artificial Sequence:  Synthetic peptide
YVAPVDSIQAEEWHFGKMGRKDAERQLLAQNNPRGTFLIRESETTKGAYSLSIRDWDDAKGDHVKHYKIRKLDNGGYYITTRTQFDTVQQLVEHYTERAAGLCCRLIGSCRRGMPK

SEQ ID NO: 2988 - protein, 107 aa, Artificial Sequence
  Description of Artificial Sequence:  Synthetic peptide
SSARFDSSDRSAWYMGPVSRQEAQTRLQGQRHGMFLVRDSSTCPGDYVLSVSENSRVSHYIINSLPNRRFKIGDQEFDHLPALLEFYKIHYLDTTTLIEPAPRYPSP

SEQ ID NO: 2989 - protein, 112 aa, Artificial Sequence
  Description of Artificial Sequence:  Synthetic peptide
VKNYVLNIWNDGYIMGFLSQERAEALLRDKAPGTFLLRFSESCRDGGIIITWVEESQEGEPVLHSTEPYNNAKINTSSMPQIIRDFTAGEKHPVNPLMYLYPDIPRDVAFGR

SEQ ID NO: 2990 - protein, 109 aa, Artificial Sequence
  Description of Artificial Sequence:  Synthetic peptide
IPVLEKPLAEQDWYHGAIPRIEAQDLLKQQGDFLVRESHGKPGEYVLSVFSDGQRRHFIIQYVDNMYRFEGTGFSNIPQLIDHHYTTKQVITKKSGVILLNPIPKDKKW

SEQ ID NO: 2991 - protein, 113 aa, Artificial Sequence; identical to SEQ ID NO: 2941
  Description of Artificial Sequence:  Synthetic peptide

SEQ ID NO: 2992 - protein, 113 aa, Artificial Sequence; identical to SEQ ID NO: 2665
  Description of Artificial Sequence:  Synthetic peptide

SEQ ID NO: 2993 - protein, 113 aa, Artificial Sequence; identical to SEQ ID NO: 2870
  Description of Artificial Sequence:  Synthetic peptide

SEQ ID NO: 2994 - protein, 113 aa, Artificial Sequence; identical to SEQ ID NO: 2895
  Description of Artificial Sequence:  Synthetic peptide

SEQ ID NO: 2995 - protein, 113 aa, Artificial Sequence; identical to SEQ ID NO: 2818
  Description of Artificial Sequence:  Synthetic peptide

SEQ ID NO: 2996 - protein, 107 aa, Artificial Sequence
  Description of Artificial Sequence:  Synthetic peptide
VPQNYIEIQTPRWFQENASRSAAEELLRHKGVGEFVIRGCQSSPGEFSISVRHESDVQHFKVMRDSRGQYFLWSEKFTSLNKLVDFYRTSSISKTREIYLNDGGPGS

SEQ ID NO: 2997 - protein, 108 aa, Artificial Sequence
  Description of Artificial Sequence:  Synthetic peptide
MSKNSDALLWYHGKITREVAVQVLLRKGGRDGFFLIRDCGNAPEDYVLSMMFRSQILHFQINCLGDNKFSIDNGPIFQGLDMLISYYKVISDGLPCKLVDFCVGKIAP

SEQ ID NO: 2998 - protein, 126 aa, Artificial Sequence
  Description of Artificial Sequence:  Synthetic peptide
ASNSSELHSAEKWFHGKLGAGRDGRHIAERLLTDYCIETGAPDGSFLVRESETFVGDYTLSFWRNGKVQHCRIHSRQEAGSPKFFLTDNLVFESLYALITHYQQMPLRCNEFEMRLTEPVPQTNAH

SEQ ID NO: 2999 - protein, 109 aa, Artificial Sequence
  Description of Artificial Sequence:  Synthetic peptide
VDANLTAPPENEWYHGCLDRQSAELRLNAADKPGSYLVRESERKPGSYVLSYLGQRGINHFRVTAVCGDFYVGGRQFQTLPELIGYYTHISNILKNERLQYPAPPPEPV

SEQ ID NO: 3000 - protein, 238 aa, Artificial Sequence
  Description of Artificial Sequence:  Synthetic peptide
ASKGEELFTGVVPILVELDGDVNGHKFSVSGEGEGDATYGKLTLKFICTTGKLPVPWPTLVTTFSYGVQCFSRYPDHMKRHDFFKSAMPEGYVQERTIFFKDDGNYKTRAEVKFEGDTLVNRIELKGIDFKEDGNILGHKLEYNYNSHNVYIMADKQKNGIKVNFKIRHNIEDGSVQLADHYQQNTPIGDGPVLLPDNHYLSTQSALSKDPNEKRDHMVLLEFVTAAGITHGMDELYK

SEQ ID NO: 3001 - protein, 229 aa, Artificial Sequence
  Description of Artificial Sequence:  Synthetic peptide
MSKGEELFTGVVPILVELDGDVNGHKFSVSGEGEGDATYGKLTLKFICTTGKLPVPWPTLVTTLTYGVQCFSRYPDHMKQHDFFKSAMPEGYVQEATISFKDDGNYKTRAEVKFEGDTLVNRIELKGIDFKEDGNILGHKLEYNYNSHNVYITADKQKNGIKANFKIRHNIEDGSVQLADHYQQNTPIGDGPVLLPDNHYLSTQSALSKDPNEKRDHMVLLEFVTAAGI

SEQ ID NO: 3002 - protein, 239 aa, Artificial Sequence
  Description of Artificial Sequence:  Synthetic peptide
MVSKGEELFTGVVPILVELDGDVNGHKFSVSGEGEGDATYGKLTLKLICTTGKLPVPWPTLVTTLGYGLQCFARYPDHMKQHDFFKSAMPEGYVQERTIFFKDDGNYKTRAEVKFEGDTLVNRIELKGIDFKEDGNILGHKLEYNYNSHNVYITADKQKNGIKANFKIRHNIEDGGVQLADHYQQNTPIGDGPVLLPDNHYLSYQSALSKDPNEKRDHMVLLEFVTAAGITHGMDELYK

SEQ ID NO: 3003 - protein, 246 aa, Artificial Sequence
  Description of Artificial Sequence:  Synthetic peptide
MSKGEELFTGVVPILVELDGDVNGHKFSVRGEGEGDATNGKLTLKFICTTGKLPVPWPTLVTTLSYGVQCFSRYPDHMKRHDFFKSAMPEGYVQERTISFKDDGTYKTRAEVKFEGDTLVNRIELKGIDFKEDGNILGHKLEYNFNSHNVYITADKQKNGIKANFKIRHNVEDGSVQLADHYQQNTPIGDGPVLLPDNHYLSTQSVLSKDPNEKRDHMVLLEFVTAAGITHGMDELYKGSHHHHHH

SEQ ID NO: 3004 - protein, 231 aa, Artificial Sequence
  Description of Artificial Sequence:  Synthetic peptide
MAHSKHGLKEEMTMKYHMEGCVNGHKFVITGEGIGYPFKGKQTINLCVIEGGPLPFSEDILSAGFKYGDRIFTEYPQDIVDYFKNSCPAGYTWGRSFLFEDGAVCICNVDITVSVKENCIYHKSIFNGMNFPADGPVMKKMTTNWEASCEKIMPVPKQGILKGDVSMYLLLKDGGRYRCQFDTVYKAKSVPSKMPEWHFIQHKLLREDRSDAKNQKWQLTEHAIAFPSALA

SEQ ID NO: 3005 - protein, 226 aa, Artificial Sequence
  Description of Artificial Sequence:  Synthetic peptide
MSAIKPDMKINLRMEGNVNGHHFVIDGDGTGKPFEGKQSMDLEVKEGGPLPFAFDILTTAFHYGNRVFAEYPDHIQDYFKQSFPKGYSWERSLTFEDGGICIARNDITMEGDTFYNKVRFHGVNFPANGPVMQKKTLKWEPSTEKMYVRDGVLTGDITMALLLEGNAHYRCDFRTTYKAKEKGVKLPGYHFVDHCIEILSHDKDYNKVKLYEHAVAHSGLPDNARR

SEQ ID NO: 3006 - protein, 221 aa, Artificial Sequence
  Description of Artificial Sequence:  Synthetic peptide
GGVIATQMTYKVYMSGTVNGHYFEVEGDGKGRPYEGEQTVKLTVTKGGPLPFAWDILSPQCQYGSIPFTKYPEDIPDYVKQSFPEGFTWERIMNFEDGAVCTVSNDSSIQGNCFTYHVKFSGLNFPPNGPVMQKKTQGWEPHSERLFARGGMLIGNNFMALKLEGGGHYLCEFKTTYKAKKPVKMPGYHYVDRKLDVTNHNKDYTSVEQCEISIARKPVVA

SEQ ID NO: 3007 - protein, 233 aa, Artificial Sequence
  Description of Artificial Sequence:  Synthetic peptide
IHMNSLIKENMRMMVVMEGSVNGYQFKCTGEGDGNPYMGTQTMRIKVVEGGPLPFAFDILATSFMYGSKTFIKHTKGIPDFFKQSFPEGFTWERVTRYEDGGVFTVMQDTSLEDGCLVYHAKVTGVNFPSNGAVMQKKTKGWEPNTEMLYPADGGLRGYSQMALNVDGGGYLSCSFETTYRSKKTVENFKMPGFHFVDHRLERLEESDKEMFVVQHEHAVAKFCDLPSKLGRL

SEQ ID NO: 3008 - protein, 232 aa, Artificial Sequence
  Description of Artificial Sequence:  Synthetic peptide
MASLLTETMPFKTTIEGTVNGHCFKCIGKGEGNPFEGTQEMKIEVIEGGPLPFAFHILSTSCMYGSKTFIKYVSGIPDYFKQSFPEGFTWERTTTYEDGGFLTAHQDTSLDGDCLVYKVKILGNNFPADGPVMQNKVGRWEPGTEIVYEVDGVLRGQSLMALKCPGGRHLTCHLHTTYRSKKPASALKMPGFHFEDHRIEIMEEVEKGKCYKQYEAAVGRYCDAAPSKLGHN

SEQ ID NO: 3009 - protein, 240 aa, Artificial Sequence
  Description of Artificial Sequence:  Synthetic peptide
MRGSHHHHHHGSALSNKFIGDDMKMTYHMDGCVNGHYFTVKGEGNGKPYEGTQTSTFKVTMANGGPLAFSFDILSTVFKYGNRCFTAYPTSMPDYFKQAFPDGMSYERTFTYEDGGVATASWEISLKGNCFEHKSTFHGVNFPADGPVMAKKTTGWDPSFEKMTVCDGILKGDVTAFLMLQGGGNYRCQFHTSYKTKKPVTMPPNHVVEHRIARTDLDKGGNSVQLTEHAVAHITSVVPF

SEQ ID NO: 3010 - protein, 225 aa, Artificial Sequence
  Description of Artificial Sequence:  Synthetic peptide
MRSSKNVIKEFMRFKVRMEGTVNGHEFEIEGEGEGRPYEGHNTVKLKVTKGGPLPFAWDILSPQFQYGSKVYVKHPADIPDYKKLSFPEGFKWERVMNFEDGGVVTVTQDSSLQDGCFIYKVKFIGVNFPSDGPVMQKKTMGWEASTERLYPRDGVLKGEIHKALKLKDGGHYLVEFKSIYMAKKPVQLPGYYYVDSKLDITSHNEDYTIVEQYERTEGRHHLFL

SEQ ID NO: 3011 - protein, 227 aa, Artificial Sequence
  Description of Artificial Sequence:  Synthetic peptide
MAGLLKESMRIKMYMEGTVNGHYFKCEGEGDGNPFAGTQSMRIHVTEGAPLPFAFDILAPCCEYGSRTFVHHTAEIPDFFKQSFPEGFTWERTTTYEDGGILTAHQDTSLEGNCLIYKVKVHGTNFPADGPVMKNKSGGWEPSTEVVYPENGVLCGRNVMALKVGDRHLICHHYTSYRSKKAVRALTMPGFHFTDIRLQMLRKKKDEYFELYEASVARYSDLPEKAN

SEQ ID NO: 3012 - protein, 243 aa, Artificial Sequence
  Description of Artificial Sequence:  Synthetic peptide
MRGSHHHHHHGSASFLKKTMPFKTTIEGTVNGHYFKCTGKGEGNPFEGTQEMKIEVIEGGPLPFAFHILSTSCMYGSKTFIKYVSGIPDYFKQSFPEGFTWERTTTYEDGGFLTAHQDTSLDGDCLVYKVKILGNNFPADGPVMQNKAGRWEPGTEIVYEVDGVLRGQSLMALKCPGGRHLTCHLHTTYRSKKPASALKMPGFHFEDHRIEIMEEVEKGKCYKQYEAAVGRYCDAAPSKLGHN

SEQ ID NO: 3013 - protein, 227 aa, Artificial Sequence
  Description of Artificial Sequence:  Synthetic peptide
VSVITSEMKMELRMEGAVNGHKFVITGKGSGQPFEGIQNMDLTVIEGGPLPFAFDILTTVFDYGNRVFVKYPEEIVDYFKQSFPEGYSWERSMSYEDGGICLATNNITMKKDGSNCFVYEIRFDGVNFPANGPVMQRKTVKWEPSTEKMYVRDGVLKGDVNMALLLQGGGHYRCDFRTTYKAKKVVQLPDYHFVDHRIEITSHDKDYNKVKLYEHAKAHSGLPRLAK

SEQ ID NO: 3014 - protein, 264 aa, Artificial Sequence
  Description of Artificial Sequence:  Synthetic peptide
MGKGEELFTGVVPILVELDGDVNGHKFSVSGEGEGDATYGKLTLKFICTTGKLPVPWPTLVTTFSYGVQCFSRYPDHMKRHDFFKSAMPEGYVQERTIFFKDDGNYKTRAEVKFEGDTLVNRIELKGIDFKEDGNILGHKLEYNYNSHNVYIMADKQKNGIKVNFKIRHNIEDGSVQLADHYQQNTPIGDGPVLLPDNHYLSTQSALSKDPNEKRDHMVLLEFVTAAGITHGMDELYKYSDLELKLRILQSTVPRARDPPDLDN

SEQ ID NO: 3015 - protein, 260 aa, Artificial Sequence
  Description of Artificial Sequence:  Synthetic peptide
MGKGEELFTGVVPILVELDGDVNGHKFSVSGEGEGDATYGKLTLKFICTTGKLPVPWPTLVTTFSYGVQCFSRYPDHMKRHDFFKSAMPEGYVQERTIFFKDDGNYKTRAEVKFEGDTLVNRIELKGIDFKEDGNILGHKLEYNYNSHNVYIMADKQKNGIKVNFKIRHNIEDGSVQLADHYQQNTPIGDGPVLLPDNHYLSTQSALSKDPNEKRDHMVLLEFVTAAGITHGMDELYKSGLRSRAQASNSAVDGTAGPGS

SEQ ID NO: 3016 - protein, 264 aa, Artificial Sequence
  Description of Artificial Sequence:  Synthetic peptide
MGKGEELFTGVVPILVELDGDVNGHKFSVSGEGEGDATYGKLTLKFICTTGKLPVPWPTLVTTFSYGVQCFSRYPDHMKRHDFFKSAMPEGYVQERTIFFKDDGNYKTRAEVKFEGDTLVNRIELKGIDFKEDGNILGHKLEYNYNSHNVYIMADKQKNGIKVNFKIRHNIEDGSVQLADHYQQNTPIGDGPVLLPDNHYLSTQSALSKDPNEKRDHMVLLEFVTAAGITHGMDELYKSGRTQISSSSFEFCSRRYRGPGIHRI

SEQ ID NO: 3017 - protein, 227 aa, Artificial Sequence
  Description of Artificial Sequence:  Synthetic peptide
MAGLLKESMRIKIYMEGTVNGYHFKCEGEGDGNPFEGTQNMRIRVTEGAPLPFAFDILSPCCAYGSKTFIKHTSGIPDYFKRSFPEGFTWEGTTIYEDGRVLTAHQDTSLEGNCPIYKVKVLGTNFPAASPVMKKVSGGWEPSTEIVYQDNGVLRGRNVMALKVSGRPPLICHLHSTYRSKKACALTMPGFHFADLRIQMPKKKKDEYFELYEASVARYSDVPEKAT

SEQ ID NO: 3018 - protein, 230 aa, Artificial Sequence
  Description of Artificial Sequence:  Synthetic peptide
MDPLVNGNLKIKMFMNGSVNKHKFKCEAEGEGNIHSGTHIMKITVTEGGPLPFAFDILSRTFCYGHKMFLDNSGNIPDFFKQSLKDGYSWERETTYEDGGVLNSKQKHTLKGDCITTYSEVTGTFPPNGPVMKKKTLGWEPSCEMVIPRDGGLIMYDNIALKLDDDHGGHLTGNFKATYKSNNPNINLPKHHFVENRVEMLEGRDGGNYVKLHERNKARYSALESELAKK

SEQ ID NO: 3019 - protein, 255 aa, Artificial Sequence
  Description of Artificial Sequence:  Synthetic peptide
RGFCRVLQNGVKNLRSRNCSTEEKPVILGAMTETFQKKLPYKLELDGDVDGQTFKVIGEGVGDATTGVIEGKYVCTEGEVPISWVSLITSLSYGAKCFVRYPNEINDFFKSTFPSGYHQERKITYENDGVLETAAKITMESGAIVNRINVKGTGFDKDGHVCQKNLESSPPSTTYVVPEGEGIRIIYRNIYPTKDGHYVVADTQQVNRPIRAQGTSAIPTYHHIKSKVDLSTDPEENKDHIIIKETNCAFDADFS

SEQ ID NO: 3020 - protein, 238 aa, Artificial Sequence
  Description of Artificial Sequence:  Synthetic peptide
MSKGAELFTGVVPILIELNGDVNGHKFSVSGEGEGDATYGKLTLKFICTTGKLPVPWPTLVTTFSYGVQCFSRYPDHMKQHDFFKSAMPEGYIQERTIFFKDDGNYKSRAEVKFEGDTLVNRIELTGTDFKEDGNILGNKMEYNYNAHNVYIMTDKAKNGIKVNFKIRHNIEDGSVQLADHYQQNTPIGDGPVLLPDNHYLSTQSTLSKDPNEKRDHMIYFEFVTAAAITHGMDELYK

SEQ ID NO: 3021 - protein, 234 aa, Artificial Sequence
  Description of Artificial Sequence:  Synthetic peptide
MSSGALLFHGKIPYVVEMEGNVDGHTFSIRGKGYGDASVGKVDAQFICTTGDVPVPWSTLVTTLTYGAQCFAKYGPELKDFYKSCMPEGYVQERTITFEGDGVFKTRAEVTFENGSVYNRVKLNGQGFKKDGHVLGKNLEFNFTPHCLYIWGDQANHGLKSAFKIMHEITGSKEDFIVADHTQMNTPIGGGPVHVPEYHHITYHVTLSKDVTDHRDNMSLVETVRAVDCRKTYL

SEQ ID NO: 3022 - protein, 232 aa, Artificial Sequence
  Description of Artificial Sequence:  Synthetic peptide
MSCSKSVIKEEMLIDLHLEGTFNGHYFEIKGKGKGQPNEGTNTVTLEVTKGGPLPFGWHILCPQFQYGNKAFVHHPDNIHDYLKLSFPEGYTWERSMHFEDGGLCCITNDISLTGNCFYYDIKFTGLNFPPNGPVVQKKTTGWEPSTERLYPRDGVLIGDIHHALTVEGGGHYACDIKTVYRAKKAALKMPGYHYVDTKLVIWNNDKEFMKVEEHEIAVARHHPFYEPKKDK

SEQ ID NO: 3023 - protein, 229 aa, Artificial Sequence
  Description of Artificial Sequence:  Synthetic peptide
MALSNKFIGDDMKMTYHMDGCVNGHYFTVKGEGNGKPYEGTQTSTFKVTMANGGPLAFSFDILSTVFKYGNRCFTAYPTSMPDYFKQAFPDGMSYERTFTYEDGGVATASWEISLKGNCFEHKSTFHGVNFPADGPVMAKKTTGWDPSFEKMTVCDGILKGDVTAFLMLQGGGNYRCQFHTSYKTKKPVTMPPNHVVEHRIARTDLDKGGNSVQLTEHAVAHITSVVPF

SEQ ID NO: 3024 - protein, 231 aa, Artificial Sequence
  Description of Artificial Sequence:  Synthetic peptide
MAQSKHGLTKEMTMKYRMEGCVDGHKFVITGEGIGYPFKGKQAINLCVVEGGPLPFAEDILSAAFNYGNRVFTEYPQDIVDYFKNSCPAGYTWDRSFLFEDGAVCICNADITVSVEENCMYHESKFYGVNFPADGPVMKKMTDNWEPSCEKIIPVPKQGILKGDVSMYLLLKDGGRLRCQFDTVYKAKSVPRKMPDWHFIQHKLTREDRSDAKNQKWHLTEHAIASGSALP

SEQ ID NO: 3025 - protein, 255 aa, Artificial Sequence
  Description of Artificial Sequence:  Synthetic peptide
LVLAITNANIFLRNEADLEEKTLRIPKALTTMGVIKPDMKIKLKMEGNVNGHAFVIEGEGEGKPYDGTHTLNLEVKEGAPLPFSYDILSNAFQYGNRALTKYPDDIADYFKQSFPEGYSWERTMTFEDKGIVKVKSDISMEEDSFIYEIRFDGMNFPPNGPVMQKKTLKWEPSTEIMYVRDGVLVGDISHSLLLEGGGHYRCDFKSIYKAKKVVKLPDYHFVDHRIEILNHDKDYNKVTLYENAVARYSLLPSQA

SEQ ID NO: 3026 - protein, 230 aa, Artificial Sequence
  Description of Artificial Sequence:  Synthetic peptide
MSCSKNVIKEFMRFKVRMEGTVNGHEFEIKGEGEGRPYEGHCSVKLMVTKGGPLPFAFDILSPQFQYGSKVYVKHPADIPDYKKLSFPEGFKWERVMNFEDGGVVTVSQDSSLKDGCFIYEVKFIGVNFPSDGPVMQRRTRGWEASSERLYPRDGVLKGDIHMALRLEGGGHYLVEFKSIYMVKKPSVQLPGYYYVDSKLDMTSHNEDYTVVEQYEKTQGRHHPFIKPLQ

SEQ ID NO: 3027 - protein, 238 aa, Artificial Sequence
  Description of Artificial Sequence:  Synthetic peptide
MNRNVLKNTGLKEIMSAKASVEGIVNNHVFSMEGFGKGNVLFGNQLMQIRVTKGGPLPFAFDIVSIAFQYGNRTFTKYPDDIADYFVQSFPAGFFYERNLRFEDGAIVDIRSDISLEDDKFHYKVEYRGNGFPSNGPVMQKAILGMEPSFEVVYMNSGVLVGEVDLVYKLESGNYYSCHMKTFYRSKGGVKEFPEYHFIHHRLEKTYVEEGSFVEQHETAIAQLTTIGKPLGSLHEWV

SEQ ID NO: 3028 - protein, 238 aa, Artificial Sequence
  Description of Artificial Sequence:  Synthetic peptide
MSKQILKNTCLQEVMSYKVNLEGIVNNHVFTMEGCGKGNILFGNQLVQIRVTKGAPLPFAFDIVSPAFQYGNRTFTKYPNDISDYFIQSFPAGFMYERTLRYEDGGLVEIRSDINLIEDKFVYRVEYKGSNFPDDGPVMQKTILGIEPSFEAMYMNNGVLVGEVILVYKLNSGKYYSCHMKTLMKSKGVVKEFPSYHFIQHRLEKTYVEDGGFVEQHETAIAQMTSIGKPLGSLHEWV

SEQ ID NO: 3029 - protein, 233 aa, Artificial Sequence
  Description of Artificial Sequence:  Synthetic peptide
MDLAKLGLKEVMPTKINLEGLVGDHAFSMEGVGEGNILEGTQEVKISVTKGAPLPFAFDIVSVAFSYGNRAYTGYPEEISDYFLQSFPEGFTYERNIRYQDGGTAIVKSDISLEDGKFIVNVDFKAKDLRRMGPVMQQDIVGMQPSYESMYTNVTSVIGECIIAFKLQTGKHFTYHMRTVYKSKKPVETMPLYHFIQHRLVKTNVDTASGYVVQHETAIAAHSTIKKIEGSLP

SEQ ID NO: 3030 - protein, 225 aa, Artificial Sequence
  Description of Artificial Sequence:  Synthetic peptide
MSVIKPIMEIKLRMQGVVNGHKFVIKGEGEGKPFEGTQTINLTVKEGAPLPFAYDILTSAFQYGNRVFTKYPDDIPDYFKQTFPEGYSWERIMAYEDQSICTATSDIKMEGDCFIYEIQFHGVNFPPNGPVMQKKTLKWEPSTEKMYVRDGVLKGDVNMALLLEGGGHYRCDFRSTYKAKKRVQLPDYHFVDHRIEILSHDNDYNTVKLSEDAEARYSMLPSQAK

SEQ ID NO: 3031 - protein, 227 aa, Artificial Sequence
  Description of Artificial Sequence:  Synthetic peptide
  MOD_RES (219): x = any natural occuring amino acid
MSVIKPDMKIKLRMEGAVNGHKFVIEGDGKGKPFEGTQSMDLTVIEGAPLPFAYDILTTVFDYGNRVFAKYPQDITDYFKQTFPEGYFWERSMTYEDQGICIATNDITMMKGVDDCFVYKIRFDGVNFPANGPVMQRKTLKWEPSTEIMYARDGVLKGDVNMALLLEGGGHYRCDFKTTYKAKKVVRLPDYHFVDHRIEIVSHDKDYNKVKLYEHAEAXXGLSRKAK

SEQ ID NO: 3032 - protein, 225 aa, Artificial Sequence
  Description of Artificial Sequence:  Synthetic peptide
MSVIKSVMKIKLRMDGIVNGHKFMITGEGEGKPFEGTHTIILKVKEGGPLPFAYDILTTAFQYGNRVFTKYPKDIPDYFKQSFPEGYSWERSMTFEDQGVCTVTSDIKLEGDCFFYEIRFYGVNFPSSGPVMQKKTLKWEPSTENMYVRDGVLLGDVSRTLLLEGDKHHRCNFRSTYGAKKGVVLPEYHFVDHRIEILSHDKDYNTVEVYENAVARPSMLPVKAK

SEQ ID NO: 3033 - protein, 221 aa, Artificial Sequence
  Description of Artificial Sequence:  Synthetic peptide
MSVIAKQMTYKVYMSGTVNGHYFEVQGDGKGKPYEGEQTVKLTVTKGGPLPFAWDILSPQSQYGSIPFTKYPEDIPDYVKQSFPEGYTWERIMNFEDGAVCTVSNDSSIQGNCFIYNVKFSGLNFPPNGPVMQKKTQGWEPNTERLFARDGMLIGNNFMALKLEGGGHYLCEFKSTYKAKKPVKMPGYHYVDRKLDVTNHNIDYTSVEQCEISIARKPVVA

SEQ ID NO: 3034 - protein, 238 aa, Artificial Sequence
  Description of Artificial Sequence:  Synthetic peptide
MSKGEELFTGIVPVLIELDGDVHGHKFSVRGEGEGDADYGKLEIKFICTTGKLPVPWPTLVTTLGYGIQCFARYPEHMKMNDFFKSAMPEGYIQERTIFFQDDGKYKTRGEVKFEGDTLVNRIELKGMDFKEDGNILGHKLEYNFNSHNVYIMPDKANNGLKVNFKIRHNIEGGGVQLADHYQTNVPLGDGPVLIPINHYLSLQTAISKDRNETRDHMVFLEFFSACGHTHGMDELYK

SEQ ID NO: 3035 - protein, 234 aa, Artificial Sequence
  Description of Artificial Sequence:  Synthetic peptide
MTSVAQEKGVIKPDMKMKLRMEGAVNGHKFVVEGDGKGKPFDGTQTMDLTVIEGAPLPFAYDILTTVFDYGNRVFAKYPEDIADYFKQTFPEGYFWERSMTYEDQGICIATNDITMMEGVDDCFAYKIRFDGVNFPANGPVMQRKTLKWEPSTEIMYARDGVLKGDVNMALLLEGGGHYRCDFKTTYKAKKVVRLPDYHFVDHRIEIVSHDKDYNKVKLHEHAEARHGLSRKAK

SEQ ID NO: 3036 - protein, 234 aa, Artificial Sequence
  Description of Artificial Sequence:  Synthetic peptide
  MOD_RES (133)..(170): x = any natural occuring amino acid
MQRAGMKVKEHMKIKLRMGGTVNGKHFAVNGTGDGYPYQGKQILKLIVEGSEPLPFAFDILSAAFQYGNRAFTEYPTEIADYFKQSFEFGEGFSWERSFTFEDGAICVATNDITMVGGEFQYDIRFDGLNFPXDGPVMQKKTVKWEPSTEIMYMQNGVLKGEVNMALLLXDKSHYRCDLKTTYKAKNNVPHPPGYHYVDHCIEILEERKDHVKLREHAKARSSLSPTSAKERKA

SEQ ID NO: 3037 - protein, 225 aa, Artificial Sequence
  Description of Artificial Sequence:  Synthetic peptide
MSVIKSVMKIKLRMEGSVNGHNFVIVGEGEGKPYEGTQSMDLTVKEGAPLPFAYDIMTTVFHYGNRVFAKYPKHIPDYFKQMFPEEYSWERSMNFEGGGICTARNEITMEGDCFFNKVRFDGVNFPPNGPVMQKKTLKWEPSTEKMYVRDGVLTGDINMALLLEGGGHYRCDFRTTYRAKKKGVKLPDYHFEDHSIEILRHDKEYTEVKLYEHAEAHSGLPRVAK

SEQ ID NO: 3038 - protein, 235 aa, Artificial Sequence
  Description of Artificial Sequence:  Synthetic peptide
  MOD_RES (198): x = any natural occuring amino acid
MQSAGKKNVVKDFMKITLRMDGAVNGKPFAVNGTGDGNPYGGIQSLKLTVDGNKPLPFAFDILSAAFQYGNRAFTEYPKEISDYFKQSFEFGEGFTWERSFTFEDGAICVATNDIKMVGDEFQYNIRFDGVNFPEDGPVMQKKTVKWEPSTEIMRVQGGVLKGEVNMALLLKDKSHYRCDFKTTYKAKNPVPPTALPXYHYVDHCIEITEENRDYVKLQEYAKARSGLHLPELQK

SEQ ID NO: 3039 - protein, 231 aa, Artificial Sequence
  Description of Artificial Sequence:  Synthetic peptide
MSALKEEMKIKLKMVGVVNGQSFQIDGEGKGKPYEGSQKLTLEVVEGGPLLFSYDILTTIFQYGNRAFVNYPKDIPDIFKQTCSGPDGGFSWQRTMTYEDGGVCTASNHISVDGDTFYYVIRFNGENFPPNGPVMQKRTVKWEPSTEIMFERDGLLRGDIAMSLLLKGGGHYRCDFKTIYTPKRKVNMPGYHFVDHCIEIQKHDKDYNMAVLSEDAVAHNSPLEKKSQAKA

SEQ ID NO: 3040 - protein, 231 aa, Artificial Sequence
  Description of Artificial Sequence:  Synthetic peptide
  MOD_RES (11): x = any natural occuring amino acid
MSALKEEMKIXLTLVGVVNGHPFKIIGDGKGKPYEGSQELTLAVVEGGPLPFSYDILTTIVHYGNRAFVNYPKDIPDIFKQTCSGPGAGYSWQRTMSFEDGGVCTATSHIRVDGDTFNYDIHFMGADFPLNGPVMQKRTVKWEPSTEIMFQCDGLLRGDVAMSLLLKGGGHYRCDFKTIYKPKKNVKMPGYHFVDHCIEITSQQDDYNVVELYEGAVAHYSPLQKPCQAKA

SEQ ID NO: 3041 - protein, 229 aa, Artificial Sequence
  Description of Artificial Sequence:  Synthetic peptide
  MOD_RES (95)..(98): x = any natural occuring amino acid
MYPWIKETMRSKVYMEGDVNNHAFKCTAVGEGKPYKGSQDLTITVTEGGPLPFAFDILSHAFQYGNKVFTDYPDDIPDFFKQSLSDGFTWRRVSXYXXGGVLTVTQDTSLKGDCIICNIKVHGTNFPENGPVMQNKTDGWEPSSTETVIPQDGGIVAARSPALRLRDKGHLICHMETTYKPNKEVKLPELHFHHLRMEKLSVSDDGKTIKQHEYVVASYSKVPSKIGRQ

SEQ ID NO: 3042 - protein, 231 aa, Artificial Sequence
  Description of Artificial Sequence:  Synthetic peptide
MAHSKHGLTDDMTMHFRMEGCVDGHKFVIEGNGNGNPFKGKQFINLCVIEGGPLPFSEDILSAAFDYGNRLFTEYPEGIVDYFKNSCPAGYTWHRSFRFEDGAVCICSADITVNVRENCIYHESTFYGVNFPADGPVMKKMTTNWEPSCEKIIPINSQKILKGDVSMYLLLKDGGRYRCQFDTIYKAKTEPKEMPDWHFIQHKLNREDRSDAKNQKWQLIEHAIASRSALP

SEQ ID NO: 3043 - protein, 231 aa, Artificial Sequence
  Description of Artificial Sequence:  Synthetic peptide
MSALKEEMKINLTMEGVVNGLPFKIRGDGKGKPYQGSQELTLTVVKGGPLPFSYDILTTMFQYGNRAFVNYPEDIPDIFKQTCSGPNGGYSWQRTMTYEDGGVCTATSNISVVGDTFNYDIHFMGANFPLDGPVMQKRTMKWEPSTEIMFERDGMLRGDIAMSLLLKGGGHYRCDFETIYKPNKVVKMPDYHFVDHCIEITSQQDYYNVVELTEVAEARYSSLEKIGKSKA

SEQ ID NO: 3044 - protein, 257 aa, Artificial Sequence
  Description of Artificial Sequence:  Synthetic peptide
ISTLKNVIIIVIIYSCSTCAVWSNSNSESSFTNGIAEEMKTRVHLEGTVNGHSFTIKGEGRGYPYKGEQFMSLEVVNGAPLPFSFDILTPAFMYGNRVFTKYPPNIPDYFKQTFPEGYHWERNIPFEDQAACTVTSHIRLEEEERRFVNNVRFHCVNFPPNGPVMQRRILKWEPSTENIYPRDGFLEGHVDMTLRVEGGGYYRAEFKSTYKGKTPVRDMPDFHFIDHRIEITEHDEDYTNVELHDVSWARYSMLPTM

SEQ ID NO: 3045 - protein, 224 aa, Artificial Sequence
  Description of Artificial Sequence:  Synthetic peptide
  MOD_RES (65)..(144): x = any natural occuring amino acid
MSMIKPEMKIKMRMDGAVNGHKFVITGEGSGEPFEGKQTMNLTVIDGGPLPFAFDILTTAFDYGXRVFAKYPEDIPDYFKQSFPEGFSWERSMTYEDGGICIATNDIKMEGDCFSYEIRFDGVNFPANSPVMQKKTVKWEPCTXEMYVRDGVLKGGLNMALLLEGGGHFRCDLKTTYKAKKVVQMPDYHFVNHRLEITWHDEDYNNVKLSEHAEAHSGLPRQAK

SEQ ID NO: 3046 - protein, 234 aa, Artificial Sequence
  Description of Artificial Sequence:  Synthetic peptide
  MOD_RES (158)..(183): x = any natural occuring amino acid
MTSVAQEKGVIKPDMKMKLRMEGAVNGHKFVIEGDGKGKPFDGTQTMDLTVIEGAPLPFAYAILTTVFDYGNRVFAKYPEDIADYFKQTFPEGYFWERSMTYEDQGICIATNDITMMKGVDDCFVYKIRFDGVNFPANGPVMQRKTLKWEPSTEKMYXRDGVLKGDVNMALLLEGGGHYRXDXKTTYRAKKVVQLPDYHFVDHRIEIVSHDKDYNKVKLYEHAEAHSGLPRQAK

SEQ ID NO: 3047 - protein, 231 aa, Artificial Sequence
  Description of Artificial Sequence:  Synthetic peptide
  MOD_RES (146)..(149): x = any natural occuring amino acid
MNALQEEMKIKLTMVGVVNGQSFKIDGKGKGKPYEGSQELTLKVVEGGPLLFSYDILTTIFQYGNRAFVNYPKDIPDIFKQTCSGLDGGYSWQRTMTYEDGGVCTATSNVSVVGDTFNYEIHFMGANFPPNGPVMQKRTVKWEPSXEIXFERDGLLRGDVPMSLLLKGGDHYRCDFKTIYKPNKKVKLPGYHFVDHCIEIKSQENDYNMVALFEDAVAHYSPLEKKSQAKA

SEQ ID NO: 3048 - protein, 239 aa, Artificial Sequence
  Description of Artificial Sequence:  Synthetic peptide
  MOD_RES (44): x = any natural occuring amino acid
MGRILILNPPSVNGIAEEMKTDLIMEGIVNGHSFTIEGKGTGYXYKGDQFMKLEVVKGAPLPFSFDILTTAFMYGNRVFTKYPSNIPDFFKQTFPEGYHWERIMPFEDQAVCTVTSHIRLEEKEEGEMRFVDNVKFHCVNFPPNGPVMQRKIMRWEPSTENMYPRNGLLEGYDEKTFRLKGGGYYQAEHKSIYEGKGSISMPDFHFIDHRIMITNHDEDYTNVELREVALARYSTLPPI

SEQ ID NO: 3049 - protein, 225 aa, Artificial Sequence
  Description of Artificial Sequence:  Synthetic peptide
MSLIKPEMKIKLLMEGNVNGHQFVIEGDGKGHPFEGKQSMDLVVKEGAPLPFAYDILTTAFHYGNRVFAKYPDHIPDYFKQSFPKGFSWERSLMFEDGGVCIATNDITLKGDTFFNKVRFDGVNFPPNGPVMQKKTLKWEASTEKMYLRDGVLTGDITMALLLKGDVHYRCDFRTTYKSRQEGVKLPGYHFVDHCISILRHDKDYNEVKLYEHAVAHSGLPDNVK

SEQ ID NO: 3050 - protein, 228 aa, Artificial Sequence
  Description of Artificial Sequence:  Synthetic peptide
MYPSIKETMRVQLSMEGSVNYHAFKCTGKGEGKPYEGTQSLNITITEGGPLPFAFDILSHAFQYGIKVFAKYPKEIPDFFKQSLPGGFSWERVSTYEDGGVLSATQETSLQGDCIICKVKVLGTNFPANGPVMQKKTCGWEPSTETVIPRDGGLLLRDTPALMLADGGHLSCFMETTYKSKKEVKLPELHFHHLRMEKLNISDDWKTVEQHESVVASYSQVPSKLGHN

SEQ ID NO: 3051 - protein, 228 aa, Artificial Sequence
  Description of Artificial Sequence:  Synthetic peptide
MYSYIKETMRSKVYMEGNVNNHAFKCTAEGEGKPYKGSQKLTITVTEGGPLPFAFDILSHAFQYGNKVFTKYPDDIPDFFKQSLSGGFTWKRVSNYEDGGVLTVDQKTSLEGDCIICNIKVHGTNFPADGPVMQKQTNGWEPSTETVIPRGEGILLRDVPALKLRNNKGHLLCVMETTYKPNKRVNLPKLHFHHLRMEKDSISDDEKTIKQHEDVRASYFNVRFDESS

SEQ ID NO: 3052 - protein, 231 aa, Artificial Sequence
  Description of Artificial Sequence:  Synthetic peptide
MALSKHGLDFDMTMKYRMEGCVDGHKFVITGHGTGNPFAGKQNVNLCVIEGGPLPFSEDILSTVFQYGNRIFTEYPNSIVDYFKNSCPAGHTWQRSLLFEDGAVCIASADISLSVEERCFYHESKFNGVNFPADGPVMKKMTTNWEPSCEKIIPVPNQGILKGDVSSYLLLKDGGRYHCQIDSVYKAKSEPKKMPDRHFIQHKLTREDRSDATNQKWQLKERAVASLSALP

SEQ ID NO: 3053 - protein, 214 aa, Artificial Sequence
  Description of Artificial Sequence:  Synthetic peptide
MAVPTQVKMKYSMDGNFNGQSFTVVGEGTGNPYEGHQSLKLTVKGEPLPFAFDILSATFTYGNRVFTKYPEGKTDYFKEAFPGGLTWERTMTFEDGGICTVAAEISLTGSVFEHKSKFVGVNFPANGPVIQKKTLGWETSTEKMAANDGSVQGYDTMFLKLEGGGRHKCYFVTNHKAKRAVKVPDNHFVWHRLVRNGDGNTVELEETAEARYDS

SEQ ID NO: 3054 - protein, 222 aa, Artificial Sequence
  Description of Artificial Sequence:  Synthetic peptide
MNLSKNVSVSVYMKGNVNNHEFEYDGEGGGDPYTGKYSMKMTLRGQNCLPFSYDIITTAFQYGFRVFTKYPEGIVDYFKDSLPDAFQWNRRIVFEDGGVLNMSSDITYKDNVLHGDVWAVGVNFPPNGPVMKNEIVMEEPTEETFTPKNGVLVGFCPKAYLLKDGSYYYGNMTTFYRSKKSGQAPPGYHFVKHRLVKTNVGHGFKTVEQTEYATAHVSDLPK

SEQ ID NO: 3055 - protein, 227 aa, Artificial Sequence
  Description of Artificial Sequence:  Synthetic peptide
MSVIKPDMKIKLRMEGAVNGHKFVIEGDGKGKPFEGTQSMDLTVKEGAPLPFAYDILTTVFDYGNRVFAKYPQDIPDYFKQTFPEGYSWERSMTYEDQGICVATNDITLMKGVDDCFVYKIRFDGVNFPANGPVMQKKTLKWEPSTEKMYVRDGVLKGDVNMALLLEGGGHYRCDFKTTYKAKKFVQLPDYHFVDHRIEILSHDKDYNKVKLYEHAEAHSGLPRQAK

SEQ ID NO: 3056 - protein, 225 aa, Artificial Sequence
  Description of Artificial Sequence:  Synthetic peptide
MSVIKPDMKIKLRMEGAVNGHNFVIEGEGKGKPFEGTQTINLTVKEGGPLPFAYDILTAAFQYGNRAFTKYPRDIADYFKQSFPEGYSWERSMTYEDQGICIIKSDIRMEGDCFIYEIRYDGVNFPPSGPVMQKKTLKWEPSTEKMYVRDGVLKGDVNMALLLEGGGHYRCDFRSTYKAKKRVQLPDYHFVDHRIEILSHDNDYNTVKLSENAEARYSMLPSQAK

SEQ ID NO: 3057 - protein, 225 aa, Artificial Sequence; identical to SEQ ID NO: 3056
  Description of Artificial Sequence:  Synthetic peptide

SEQ ID NO: 3058 - protein, 222 aa, Artificial Sequence
  Description of Artificial Sequence:  Synthetic peptide
MPAMKIECRISGTLNGVVFELVGGGEGIPEQGRMTNKMKSTKGALTFSPYLLSHVMGYGFYHFGTYPSGYENPFLHAANNGGYTNTRIEKYEDGGVLHVSFSYRYEAGRVIGDFKVVGTGFPEDSVIFTDKIIRSNATVEHLHPMGDNVLVGSFARTFSLRDGGYYSFVVDSHMHFKSAIHPSILQNGGSMFAFRRVEELHSNTELGIVEYQHAFKTPTAFA

SEQ ID NO: 3059 - protein, 222 aa, Artificial Sequence
  Description of Artificial Sequence:  Synthetic peptide
MPVMKIECRISGTMNGEEFELVGAGDGNTDEGRMTNKMKSTKGPLSFSPYLLSHIMGYGFYHYATFPAGYENVYLHAAKNGGYTNTRTERYEDGGIISVNFTYRYEGNKVIGDFKVVGSGFPANSVIFTDKIIKSNPTCEHIYPKGDNILVNAYTRTWMLRDGGYYSAQVNNHLHFKTAMHPTMLQNGGSMFTYRKVEELHSQSDVGIVEYQHVFKTPTAFA

SEQ ID NO: 3060 - protein, 222 aa, Artificial Sequence
  Description of Artificial Sequence:  Synthetic peptide
MPDMKLECHISGTMNGEEFELIGAGDGNTDEGRMTNKMKSIKGPISFSPYLLSHILGYGYYHFATFPAGYENIYLHAMKNGGYSNVRTERYEDGGIISITFNYRYEGNKIIGDFKVVGTGFPTNSLIFTDKIIKSNPTCENMFPKADNTLVNAYTRTYLLKDGGYYSAQVNNHMHFKSAIHTTMLQNGGSMFTYRVVEETHTQNEVAIVEYQNVFKTPTAFA

SEQ ID NO: 3061 - protein, 222 aa, Artificial Sequence
  Description of Artificial Sequence:  Synthetic peptide
MPDMKLECHISGTMNGEEFELIGSGDGNTDQGRMTNNMKSIKGPLSFSPYLLSHILGYGYYHFATFPAGYENIYLHAMKNGGYSNVRTERYEDGGIISITFNYRYEGSKIIGDFKVIGTGFPTDSLIFTDKIIKSNPTCENMFPKADNILVNAYTRTYLLKDGGYYSAQVNNHMHFKSAIHPTMLQNGGSMFTHRVVEENHTKTNVAIVEYQNVFKTPTAFA

SEQ ID NO: 3062 - protein, 222 aa, Artificial Sequence
  Description of Artificial Sequence:  Synthetic peptide
MAAMKIECRITGTMNGVEFELVGGGEGNTDQGRMTNKMKSTKGPLSFSPYLLSHVMGYGFYHFGTFPSGYENPYVHAMTNGGYTNTRIESYEDGGVLYLTFNYRLDGNKIIGDFKCVGTGFPEDSVIFTDKIIKSNPNCEHFYPMAENIMKNAYMRTLSLRDGGYYSGQVTSHIHFKNAIHPSILHNGGSMFTYRRVEELHTQTDLGIVEYQHVFKTPTAFA

SEQ ID NO: 3063 - protein, 225 aa, Artificial Sequence
  Description of Artificial Sequence:  Synthetic peptide
MSQLDNNLSVSVYMKGNVNNHEFEYDGIGGGDPNSGQFSLKTKLRGGKPLPFSYDIITMGFQYGFRAFTKYPEGIADYFKGSFPEAFQWNRRIEFEDGGVINMSSDITYKDKVLHGDVWALGVNFPPNGPVMKNEIVMEEPAEETLTAKNGVLVGFCPKAYLLKDGSYYYGHMTTFYRSKKSGQPLPGFHFIKHRLVKTKVEPGFKMVEQAEYATAHVCDLPKPN

SEQ ID NO: 3064 - protein, 225 aa, Artificial Sequence
  Description of Artificial Sequence:  Synthetic peptide
MAEYFEKPLPYKVELEGDVDGQKFTVIGEGQGDASTGRVEGKYVCTKGEVPISWVSLITSLSYGGKCFVRYPNVIKDFFKSTFPTGYHQERKITYEDDGVLETAAKVTLESGAIYNRISVKGVGFKKDGNVCKKRLHSSPPQVSYVVPYGEGIRVLYSNIYPTKDGGYVVADTRQVNRPIKAEGKSAIPKYHYIKSKIDLSTDPNERKDHIIIKEVNVASGIDFS

SEQ ID NO: 3065 - protein, 232 aa, Artificial Sequence
  Description of Artificial Sequence:  Synthetic peptide
MEGGPALFQSDMTFKIFIDGVVNDQKFTIIADGSSKFPHGDFNVHAVCETGKLPMSWKPICHLIQYGEPFFAKYPNGISHFAQECFPEGLTIDRTVRFENDGTMTSHHTYELDGTCVISRITVNCDGFQPDGPIMKDQLVDILPTETHMFPHGSNAVRQLCYIGFTTADGGLMMSHFDSKLTFNGSRAIKIPGPHFVTVIIKQMKDTSDKRDHVCQREVTYAHSVPRITSAI

SEQ ID NO: 3066 - protein, 223 aa, Artificial Sequence
  Description of Artificial Sequence:  Synthetic peptide
MSLSKQVIGKEMNMTYLMDGSVNGHNFTVEGEGDGKPYEGHQCLKLRITKGEPLPFAFDILTAAFCYGNRCFVNYPAEIADYFKQAFPEGLTWERSMTFEDGGFAAVSADISLNGNCFVHQSKFVGVNFPADGPVMQKKTVGWEPSTEKMIVRDGILEGDVTMYLKLEGGGNYRCEYRTIYKAKKDVKMPKSHFVEHTLVRNNIKKDAKGNTIELIEDASARY

SEQ ID NO: 3067 - protein, 219 aa, Artificial Sequence
  Description of Artificial Sequence:  Synthetic peptide
MVLSKQMNMTYLMDGSVNGHNFTVEGEGDGKPYEGHQCLKLRITKGEPLPFAFDILTAAFCYGNRCFVNYPAEIADYFKQAFPEGLTWERSMTFEDGGFAAVSADLSLKNGNWFVHQSKFVGVNFPADGPVMQKKTVGWEPSTEKMIVRDGTLEGDVTMYLKLEGGGNYRCDYRTIYKAKKDVKMPKSHFVEHTLVRNNIKKDAKGNTIELIEDASARY

SEQ ID NO: 3068 - protein, 226 aa, Artificial Sequence
  Description of Artificial Sequence:  Synthetic peptide
MALSKQEIKKEMTMDYVMDGCVNGHSFTVKGDGAGKPYEGHQRLSLHVTGGQPLPFAFDILSAAFAYGNRCFTKYPKEIPDMFKQAFPGGMSWERTMTFEDGGVASVSADISIEKDGCFKHRSKFVGVNFPVNGPVMQNKTRGWEPSIEKMTVRDGTLKGHVTMFLKLEGGGNYRCDFETTYKAKKAVKMLDSHFIEHRLVTTIRGNNVELQEDAEARNSGLGECK

SEQ ID NO: 3069 - protein, 228 aa, Artificial Sequence
  Description of Artificial Sequence:  Synthetic peptide
MYSYIKETMRSKVYMEGNVNNHAFKCTAEGEGKPYKGSQNLTITVTEGGPLPFAFDILSHAFRYGNKVFTKYPDDIPDFFKQSLSGGFTWKRVSNYEDGGVLTVTQETSLKGDCIICNIKVHGTNFPADGPVMQKRTNGWEPSTETVIPRDGEIRMRDVPALKLLDNKGHLLCVMETTYKPNKKVNLPKLHFHHLRMEKDSISDDEKTIKQHEHVVASYFNVPFDDSS

SEQ ID NO: 3070 - protein, 225 aa, Artificial Sequence
  Description of Artificial Sequence:  Synthetic peptide
MCSYIKETMQSKVYMEGKVNDHNFKCTAEGKGEPYKGSQSLTITVTEGGPLPFAFDILSHAFRYGNKVFAKYPKDHPDFFKQSLPEGFTWERVSNYEDGGVLTVKQETSLEGDCIICKIKAHGTNFPADGPVMQKRTNGWEPSTETVIPRGGGILMRDVPALKLLGNKGHLLCVMETTYKSKKKVNLPKPHFHHLRMEKDSVSDDEKTIEQHENVRASYFNDSGK

SEQ ID NO: 3071 - protein, 210 aa, Artificial Sequence
  Description of Artificial Sequence:  Synthetic peptide
MKMKYFMDGSVNGHEFTIEGEGTGKPYEGHQEMTLRVTMANGGPMPFSFDLVSHTFCYGHRPFTKYPEEIPDYFKQAFPEGLSWERSLQFEDGGFAAVSAHISLRGNCFEHKSKFVGVNFPADGPVMQNQSSDWEPSTEKITTYDGVLKGDVTMFLKLEGGGNHKCQFKTTYKAAKKVLKMPQSHFIGHRLVRKTKGNITELVEDAVAHC

SEQ ID NO: 3072 - protein, 217 aa, Artificial Sequence
  Description of Artificial Sequence:  Synthetic peptide
MSVIKPEMKMKYFMDGSVNGHEFTVEGEGTGKPYEGHQEMTLRVTMAKGGPMPFSFDLVSHTFCYGHRPFTKYPEEIPDYFKQAFPEGLSWERSLQFEDGGFAAVSAHISLRGNCFEHKSKFVGVNFPADGPVMQNQSSDWEPSTEKITTCDGVLKGDVTMFLKLAGGGNHKCQFKTTYKAAKKILKMPQSHFIGHRLVRKTEGNITELVEDAVAHC

SEQ ID NO: 3073 - protein, 218 aa, Artificial Sequence
  Description of Artificial Sequence:  Synthetic peptide
MVSVIKPEMKMRYYMDGSVNGHEFTIEGEGTGRPYEGHQEMTLRVTMAKGGPMPFAFDLVSHVFCYGHRPFTKYPEEIPDYFKQAFPEGLSWERSLEFEDGGSASVSAHISLRGNTFYHKSKFTGVNFPADGPIMQNQSVDWEPSTEKITASDGVLKGDVTMYLKLEGGGNHKCQFKTTYKAAKKILKMPGSHYISHRLVRKTEGNITELVEDAVAHS

SEQ ID NO: 3074 - protein, 232 aa, Artificial Sequence
  Description of Artificial Sequence:  Synthetic peptide
MVSYSKQGIAQEMRTKYRMEGSVNGHEFTIEGVGTGNPYEGKQMSELVIIKSKGKPLPFSFDILSTAFQYGNRCFTKYPADMPDYFKQAFPDGMSYERSFLFEDGGVATASWSIRLEGNCFIHNSIYHGVNFPADGPVMKKQTIGWDKSFEKMSVAKEVLRGDVTQFLLLEGGGYQRCRFHSTYKTEKPVAMPPSHVVEHQIVRTDLGQTAKGFKVKLEEHAEAHVNPLKVK

SEQ ID NO: 3075 - protein, 232 aa, Artificial Sequence
  Description of Artificial Sequence:  Synthetic peptide
MALSKHGLTKDMTMKYHMEGSVDGHKFVITGHGDGNPFEGKQTINLCVAEGGPLPFSEDILSAAFDYGNRVFTEYPQGMVDFFKNSCPAGYTWHRSLLFEDGAVCTTSADITVSVEENCFYHNSKFHGVNFPADGPVMKKMTTNWEPSCEKIIPVPRQGILKGDIAMYLLLKDGGRYRCQFDTIYKAKSDPKEMPEWHFIQHKLTREDRSDAKNQKWQLVEHAVASRSALPG

SEQ ID NO: 3076 - protein, 236 aa, Artificial Sequence
  Description of Artificial Sequence:  Synthetic peptide
MSCSKNVIKEFMRFKVRMEGTVNGHEFEIEGEGEGRPYEGHNTVKLKVTKGGPLPFAWDILSPQFQYGSKVYVKHPADIPDYKKLSFPEGFKWERVMNFEDGGVVTVTQDPSLQDGCFIYKVKFIGVNFPSDGPVMQKKTMGWEASTERLYPRDGVLKGEIHKALKLKDGGHYLVEFKTIYMAKKPVQLPGYYYVDSKLDITSHNKDYTIVEQYERTEGRHHLFLKAELGSNVGER

SEQ ID NO: 3077 - protein, 227 aa, Artificial Sequence
  Description of Artificial Sequence:  Synthetic peptide
  MOD_RES (185)..(221): x = any natural occuring amino acid
MSWSKSVIKEEMLINLHLEGTFNGHYFEIKGKGKGNPNEGTNTVTLEVTKGGPLPFGWHILCPQFQYGNKAFVHHPDDIPDYLKLSFPEGYTWERSMHFEDGGLCCITNDISLTGNCFNYDIKFTGLNFPPNGPVVQKKTTGWEPSTERLYPRDGVLIGDIHHALTVAGGGHYVCDIKTVYRAKXPVKMPGYHYVDPKLVIRSNDKEFMKVEEHEIAVARXHPLQSQ

SEQ ID NO: 3078 - protein, 230 aa, Artificial Sequence
  Description of Artificial Sequence:  Synthetic peptide
MSAIKTVVKQFMKIKMSLEGTVNGHYFKIVGEGDGTPFEGKQTLHLKVKEGAPLPFAYDILTTALHYGNRVFVEYPENIPDYFKQSFPKGYSWERSLTFEDGGICIARSDIKMVGDTFHNEVQFYGVNFPANGPVMQRHTVKWEPSTEKIYVRDGVLTGDITMALLLKGGTHYRCDFRTTYKAKEKGPKFPGYHLVDHCIEITSHDKDYNVVELYEHAVAHSGLPDSANR

SEQ ID NO: 3079 - protein, 231 aa, Artificial Sequence
  Description of Artificial Sequence:  Synthetic peptide
MSYSKQGIVQEMKTKYRMEGSVNGHEFTIEGVGTGYPYEGKQMSELVIIKPKGKPLPFSFDILSSVFQYGNRCFTKYPADMPDYFKQAFPDGMSYERSFLFEDGAVATASWNIRLEGNCFIHNSIFHGVNFPADGPVMKKKTIGWDKSFEKMTVSKEVLRGDVTMFLMLEGGGYHRCQFHSTYKTEKPVELPPNHVVEHQIVRTDLGQSAKGFTVKLEAHAAAHVNPLKVQ

SEQ ID NO: 3080 - protein, 231 aa, Artificial Sequence
  Description of Artificial Sequence:  Synthetic peptide
MSLSKHGITQEMPTKYHMKGSVNGHEFEIEGVGTGHPYEGTHMAELVIIKPAGKPLPFSFDILSTVIQYGNRCFTKYPADLPDYFKQAYPGGMSYERSFVYQDGGIATASWNVGLEGNCFIHKSTYLGVNFPADGPVMTKKTIGWDKAFEKMTGFNEVLRGDVTEFLMLEGGGYHSCQFHSTYKPEKPVELPPNHVIEHHIVRTDLGKTAKGFMVKLVQHAAAHVNPLKVQ

SEQ ID NO: 3081 - protein, 231 aa, Artificial Sequence
  Description of Artificial Sequence:  Synthetic peptide
MSYSKQGIAQVMKTKYHMEGSVNGHEFTIEGVGTGNPYEGTQMSELVITKPAGKPLPFSFDILSTVFQYGNRCFTKYPEGMTDYFKQAFPDGMSFERSFLYEDGGVATASWNIRLERDCFIHKSIYHGVNFPADGPVMKKKTIGWDKAFEKMTVSKDVLRGDVTEFLMLEGGGYHSCQFHSTYKPEKPVTLPPNHVVEHHIVRTDLGQTAKGFTVKLEEHAAAHVNPLKVQ

SEQ ID NO: 3082 - protein, 226 aa, Artificial Sequence
  Description of Artificial Sequence:  Synthetic peptide
MSVIVKEMMTKLHMEGTVNGHAFTIEGKGKGDPYNGVQSMNLDVKGGAPLPFSFDLLTPAFMYGNRVFTKYPEDIPDFFKQVFPEGYHWERSITFEDQAVCTATSHIRLDQKEMCFIYDVRFHGVNFPANGPIMQKKILGWEPSTEKMYARDGVLKGDVNMTLRVEGGGHYRADFRTTYKAKKPVNLPGYHFIDHRIEITKHSKDYTNVALYEAAVARHSPLPKVA

SEQ ID NO: 3083 - protein, 225 aa, Artificial Sequence
  Description of Artificial Sequence:  Synthetic peptide
MSVIKPEMKIKLCMRGTVNGHNFVIEGEGKGNPYEGTQILDLNVTEGAPLPFAYDILTTVFQYGNRAFTKYPADIQDYFKQTFPEGYHWERSMTYEDQGICTATSNISMRGDCFFYDIRFDGVNFPPNGPVMQKKTLKWEPSTEKMYVRDGVLKGDVNMALLLEGGGHYRCDFKTTYKAKKDVRLPDYHFVDHRIEILKHDKDYNKVKLYENAVARYSMLPSQAK

SEQ ID NO: 3084 - protein, 226 aa, Artificial Sequence
  Description of Artificial Sequence:  Synthetic peptide
MVSKGEEVIKEFMRFKVRMEGSVNGHEFEIEGEGEGRPYEGTQTAKLKVTKGGPLPFAWDILSPQCMYGSKGYVKHPADIPDYLKLSFPEGFKWERVMNFEDGGVVTVTQDSSLQDGEFIYKVKLRGTNFPSDGPVMQKKTMGWEASSERMYPEDGALKGEMKMRLKLKDGGHYDAEVKTTYMAKKPVQLPGAYKTDIKLDITSHNEDYTIVEQYERAEGRHSTGA

SEQ ID NO: 3085 - protein, 224 aa, Artificial Sequence
  Description of Artificial Sequence:  Synthetic peptide
MSVIKPDMKIKLRMEGAVNGHPFAIEGVGLGKPFEGKQSMDLKVKEGGPLPFAYDILTTVFCYGNRVFAKYPENIVDYFKQSFPEGYSWERSMNYEDGGICNATNDITLDGDCYIYEIRFDGVNFPANGPVMQKRTVKWEPSTEKLYVRDGVLKGDVNMALSLEGGGHYRCDFKTTYKAKKVVQLPDYHFVDHHIEIKSHDKDYSNVNLHEHAEAHSELPRQAK

SEQ ID NO: 3086 - protein, 237 aa, Artificial Sequence
  Description of Artificial Sequence:  Synthetic peptide
MEGGPALFQSDMTFKIFIDGEVNGQKFTIVADGSSKFPHGDFNVHAVCETGKLPMSWKPICHLIQYGEPFFARYPDGISHFAQECFPEGLSIDRTVRFENDGTMTSHHTYELDDTCVVSRITVNCDGFQPDGPIMRDQLVDILPNETHMFPHGPNAVRQLAFIGFTTADGGLMMGHFDSKMTFNGSRAIEIPGPHFVTIITKQMRDTSDKRDHVCQREVAYAHSVPRITSAIGSDED

SEQ ID NO: 3087 - protein, 225 aa, Artificial Sequence
  Description of Artificial Sequence:  Synthetic peptide
MNLIKEDMRVKVHMEGNVNGHAFVIEGEGKGKPYEGTQTLNLTVKEGAPLPFSYDILTTALHYGNRVFTKYPEDIPDYFKQSFPEGYSWERTMTYEDKGICTIRSDISLEGDCFFQNVRFNGMNFPPNGPVMQKKTLKWEPSTEKLHVRDGLLVGNINMALLLEGGGHYLCDFKTTYKAKKVVQLPDYHFVDHRIEILSNDSDYNKVKLYEHGVARYSPLPSQAW

SEQ ID NO: 3088 - protein, 221 aa, Artificial Sequence
  Description of Artificial Sequence:  Synthetic peptide
MSLSKQVLPRDVKMRYHMDGCVNGHQFIIEGEGTGKPYEGKKILELRVTKGGPLPFAFDILSSVFTYGNRCFCEYPEDMPDYFKQSLPEGHSWERTLMFEDGGCGTASAHISLDKNCFVHKSTFHGVNFPANGPVMQKKTLNWEPSSELITAGDGILKGDVTMFLMLEGGHRLKCQFTTSYKAKKAVKMPPNHIIEHRLVRKEVADAVQIQEHAVAKHFIV

SEQ ID NO: 3089 - protein, 221 aa, Artificial Sequence
  Description of Artificial Sequence:  Synthetic peptide
MSHSKQVITQEMKMVYHMDGCVNGHSFTIEGEGTGKPYEGNQTLKLRVTKGGPLPFAFDILTATFCYGNRCFCEYPEDMPDYYKQSFPEGYSFERTMMFEDGACCTTSVHLSLTKNCFVHNSTFHGVNFPANGPVMQKKTLNWEPSSEKITPFEGNLKGDVTMFLKLEGGQQHRCQFQTTYKAHKAVKMPPNHIIEHRLVRSQDGDAVQLKEHAVAKCFTA

SEQ ID NO: 3090 - protein, 222 aa, Artificial Sequence
  Description of Artificial Sequence:  Synthetic peptide
MSLSKQVILKDMNLKFEMKGSVNGHYFEIEGEGRGKPYEGVQKSTFWVTKGGPLPFSFDILSSAFKYGNRCFTKYPADMPDYFKEAFPAGMSFERTFTFEDGGVATASGHICLEGNWFKHTSMFHGVNFPANGPIMQKRTIGWDPSFEKMTVSNNILRGDVTMFLQLKGGGYHSCQFHTSYKTKEPVTLPQNHVVEHRITRTDIEDKKVLLEETAVAHVNPL

SEQ ID NO: 3091 - protein, 231 aa, Artificial Sequence
  Description of Artificial Sequence:  Synthetic peptide
MASLVKKDMCIKMTMEGTVNGHHFKCVGEGEGKPFEGTQVEKIRITEGGPLPFAYDILAPCCMYGSKTFIKHVSGIPDYFKESFPEGFTWERTQIFEDGGYLTIHQDTSLQGNNFIFKVNVIGANFPANGPVMQKKTAGWEPCVEMLYPRDGVLCGQSLMALKCTDGNHLTSHLRTTYRSRKPSNAVNMPEFHFGDHRIEILKAEQGKFYEQYESAVARYCEAAPSKLGHH

SEQ ID NO: 3092 - protein, 225 aa, Artificial Sequence
  Description of Artificial Sequence:  Synthetic peptide
MSAIKPDMKIKLRMKGAVNGHTFEIEGEGKGKPFEGKQNMDLKVVDGGPLPFAYDILTTVFHYGNRVFAKYPGDIADYFKQSFPEGYSWERSMTYEDGGVCIATNDITLVGDVFSRSEIRFEGVNFPANGPVMQKKTVKWEPSTEKMYVRDGVLKGDVNMALLLEGGGHYRCDFKTTYKAKKVVQLPEYHFVDHRIEIVSHDRDYNIVKLREHAEAHFGLPKQAK

SEQ ID NO: 3093 - protein, 219 aa, Artificial Sequence
  Description of Artificial Sequence:  Synthetic peptide
MTTFKIESRIHGNLNGEKFELVGGGVGEEGRLEIEMKTKDKPLAFSPFLLSHCMGYGFYHFASFPKGTKNIYLHAATNGGYTNTRKEIYEDGGILEVNFRYTYEFNKIIGDVECIGHGFPSQSPIFKDTIVKSCPTVDLMLPMSGNIIASSYARAFQLKDGSFYTAEVKNNIDFKNPIHESFSKSGPMFTHRRVEETHTKENLAMVEYQQVFNSAPRDM

We claim:

1. A method comprising:
(a) testing the size and diversity of an alignment of a family of M biological sequences, each biological sequence having N positions, each position being occupied by one biological position element of a group of biological position elements;
(b) calculating a statistical conservation value for each biological position element in a pair of biological position elements at different positions in the alignment; and
(c) measuring conserved co-variation between the biological position elements in the pair using the statistical conservation values.

2. The method of claim 1, where the calculating of (b) comprises calculating a statistical conservation value for each biological position element at each position in the alignment.

3. The method of claim 2, where the measuring of (c) comprises measuring conserved co-variation between every pair of biological position elements at every pair of positions in the alignment using the statistical conservation values.

4. The method of claim 2, where the calculating of (b) comprises calculating a statistical conservation value ΔE_{i,x}^{stat} for each biological position element x in the pair of biological statistical elements at different positions i in the alignment using the following equation:
$$Δ {E}_{i , x}^{stat} = {γ}^{*} ln ( \frac{{P}_{i}^{x}}{{P}_{align}^{x}} ) ,$$
where Pᵢ^{x} is the probability of biological position element x at position i;
P_{align}^{x} is the probability of biological position element x in the alignment; and
γ* is an arbitrary statistical energy unit.

5. The method of claim 4, where Pᵢ^{x} is calculated using a binomial density function as set forth in the following equation:
$${P}_{i}^{x} = \frac{z !}{( {zf}_{i}^{x} ) ( z - {zf}_{i}^{x} )} {{p}_{x}^{{zf}_{i}^{x}} ( 1 - {p}_{x} )}^{z - {zf}_{i}^{x}} ,$$
where
$${f}_{i}^{x} = \frac{{m}_{i}^{x}}{M} , {m}_{i}^{x}$$
is the number of biological position elements x at position i in the alignment, z is a normalization factor, zfᵢ^{x} is the number of biological sequences having biological position element x in a normalized version of the alignment having z biological sequences, and pₓ is a baseline mean frequency of biological position element x.

6. The method of claim 5, where z is 100.

7. The method of claim 2, where the calculating of (b) comprises calculating a statistical conservation value ΔE_{i,x}^{stat} for each biological position element x at each position i in the alignment using the following equation:
$$Δ {E}_{i , x}^{stat} = {γ}^{*} ln ( \frac{{P}_{i}^{x}}{{P}_{align}^{x}} ) ,$$
where Pᵢ^{x} is the probability of biological position element x at position i;
P_{align}^{x} is the probability of biological position element x in the alignment; and
γ* is an arbitrary statistical energy unit.

8. The method of claim 7, where Pᵢ^{x} is calculated using a binomial density function as set forth in the following equation:
$${P}_{i}^{x} = \frac{z !}{( {zf}_{i}^{x} ) ( z - {zf}_{i}^{x} )} {{p}_{x}^{{zf}_{i}^{x}} ( 1 - {p}_{x} )}^{z - {zf}_{i}^{x}} ,$$
where
$${f}_{i}^{x} = \frac{{m}_{i}^{x}}{M} , {m}_{i}^{x}$$
is the number of biological position elements x at position i in the alignment, z is a normalization factor, zfᵢ^{x} is the number of biological sequences having biological position element x in a normalized version of the alignment having z biological sequences, and pₓ is a baseline mean frequency of biological position element x.

9. The method of claim 8, where z is 100.

10. The method of claim 7, further comprising:
(d) perturbing the alignment by eliminating each biological sequence from the alignment such that M subalignments each having M−1 sequences are created.

11. The method of claim 10, where the measuring of (c) comprises calculating a change in statistical conservation of each biological position element at each position after each elimination of a biological sequence from the alignment.

12. The method of claim 10, where the measuring of (c) comprises:
(i) calculating a statistical conservation value ΔE_{i,x}^{stat} for each biological position element x at each position i in each of the M subalignments after each elimination of a biological sequence from the alignment; and
(ii) calculating a statistical conservation difference value ΔΔE_{i,x,δm}^{stat} after (i) using
$$ΔΔ {E}_{i , x , δ m}^{stat} = ( Δ {E}_{i , x}^{stat} - Δ {E}_{i , x \vert δ m}^{stat} ) * \frac{M}{z} ,$$
where δm signifies a given elimination of one biological sequence from the alignment;
ΔE_{i,x,δm}^{stat} is calculated for each biological position element x at each position i in each subalignment in the same manner as the statistical conservation values ΔE_{i,x}^{stat} in claim 7; and
M/z is a normalization factor.

13. The method of claim 12, where z comprises 100.

14. The method of claim 12, where the measuring of (c) further comprises:
(iii) arranging the statistical conservation difference values ΔΔE_{i,x,δm}^{stat} into a perturbation vector \vec{ΔΔE}_{i,x}^{stat} for each biological position element x at each position i in the alignment, where
$${\vec{ΔΔ E}}_{i , x}^{stat} = \{ Δ Δ {E}_{i , x , δ m 1}^{stat} , Δ Δ {E}_{i , x , δ m 2}^{stat} , … , Δ Δ {E}_{i , x , δ m M}^{stat} \} .$$

15. The method of claim 12, where the perturbing of (d) creates M-dimensional space, and the measuring of (c) further comprises:
(iv) calculating a statistical coupling value C_{i,x,j,y}^{ev} for each pair of biological position elements x and y at each pair of positions i and j in the alignment, using
$${C}_{i , x , j , y}^{ev} = {\vec{ΔΔ E}}_{i , x}^{stat} \cdot {\vec{ΔΔ E}}_{j , y}^{stat} ,$$
where
$${\vec{ΔΔ E}}_{i , x}^{stat} \cdot {\vec{ΔΔ E}}_{j , y}^{stat} = \vert {\vec{ΔΔ E}}_{i , x}^{stat} \vert \vert {\vec{ΔΔ E}}_{j , y}^{stat} \vert cos θ ,$$
and θ is the angle between perturbation vectors \vec{ΔΔE}_{i,x}^{stat} and \vec{ΔΔE}_{j,y}^{stat} in the M-dimensional space.

16. The method of claim 12, further comprising:
(e) arranging the statistical coupling values into a statistical coupling matrix (SCM) having dimensions N×N×r×r, where r represents the number of biological position elements in the group.

17. The method of claim 16, where the biological sequences comprise proteins, the biological position elements comprise amino acids, and r comprises 20.

18. The method of claim 16, where the biological sequences comprise nucleic acid sequences, the biological position elements comprise nucleic acids, and r comprises 4.

19. The method of claim 16, further comprising:
(f) designing artificial biological sequences using the SCM.

20. The method of claim 16, further comprising:
(f) designing artificial biological sequences using a subset of the SCM.

21. The method of claim 19, where the M biological sequences in the alignment are functionally organized in M rows and N columns, and the designing of (f) comprises:
(i) randomizing the alignment to yield a randomized alignment that retains M biological sequences in M rows and N columns;
(ii) iteratively altering the randomized alignment to yield altered alignments;
(iii) creating a statistical coupling matrix for each altered alignment; and
(iv) determining whether to accept an alteration.

22. The method of claim 21, where the determining of (f)(iv) comprises using an optimization algorithm in determining whether to accept an alteration.

23. The method of claim 22, where the optimization algorithm comprises a simulated annealing algorithm.

24. The method of claim 21, where the alignment has a conservation pattern, and the randomizing of (f)(i) substantially preserves the conservation pattern.

25. The method of claim 19, where the M biological sequences in the alignment are functionally organized in M rows and N columns, the SCM comprises an SCM_{target}, and the designing of (f) comprises:
(i) randomizing the alignment to yield a randomized alignment that retains M biological sequences in M rows and N columns, the randomized alignment comprising an iteration 0 alignment (alignment₀);
(ii) obtaining a statistical coupling matrix SCM₀ for alignment₀;
(iii) swapping two biological position elements within one column of the randomized alignment to yield an alignmentₙ, where each swapping comprises an iteration, and n comprises the number of iterations;
(iv) obtaining a statistical coupling matrix SCMₙ for the alignmentₙ;
(v) obtaining a scalar system energy value eₙ, where eₙ=|SCMₙ−SCM_{target}|;
(vi) obtaining a scalar system energy value difference Δe, where Δe=eₙ−eₙ₋₁; and
(vii) determining whether to accept a swapping from (f)(ii) for a given iteration, where the determining comprises:
(1) if Δe≦0, accepting the swapping of (f)(ii) for the given iteration; and
(2) if Δe>0, accepting the swapping of (f)(ii) for the given iteration with a non-zero probability; and
(viii) repeating (f)(ii)-(f)(vii) until a termination criteria is satisfied.

26. The method of claim 25, where the non-zero probability comprises
$$exp ( \frac{- Δ e}{β} )$$
and β decreases.

27. The method of claim 26, where β decreases according to the number of acceptances (f)(vi)(1) or (f)(vi)(2).

28. The method of claim 25, where the termination criteria is based on the frequency of acceptances (f)(vii)(1) or (f)(vii)(2) relative to the number of swappings attempted.

29. The method of claim 25, where the alignment has a conservation pattern, and the randomizing of (f)(i) substantially preserves the conservation pattern.

30. The method of claim 25, where the biological sequences comprise proteins, the biological position elements comprise amino acids, and r comprises 20.

31. The method of claim 25, where the biological sequences comprise nucleic acid sequences, the biological position elements comprise nucleic acids, and r comprises 4.

32. The method of claim 25, where the scalar system energy values form a convergence trajectory relative to the number of iterations, and the designing of (f) further comprises:
(ix) selecting artificial biological sequences at different points along the convergence trajectory.

33. The method of claim 15, where the biological sequences in the alignment are part of a family of biological sequences, and the method further comprises:
(e) reducing the C_{i,x,j,y}^{ev} values to C_{i,j}^{ev} values; and
(f) using a clustering algorithm to group positions with similar C_{i,j}^{ev} values.

34. The method of claim 33, where the clustering algorithm comprises a hierarchal clustering algorithm.

35. The method of claim 33, further comprising:
(g) mapping the grouped positions on a representation of a 3D structure of a biological sequence in the alignment.

36. A method comprising:
(a) calculating a statistical conservation value for each biological position element in a pair of biological position elements at different positions in an alignment of a family of M biological sequences, each biological sequence having N positions, and each position being occupied by one biological position element of a group of biological position elements; and
(b) measuring conserved co-variation between the biological position elements in the pair using the statistical conservation values.

37. The method of claim 36, where the calculating of (a) comprises calculating a statistical conservation value for each biological position element at each position in the alignment.

38. The method of claim 37, where the measuring of (b) comprises measuring conserved co-variation between every pair of biological position elements at every pair of positions in the alignment using the statistical conservation values.

39. The method of claim 37, where the calculating of (a) comprises calculating a statistical conservation value ΔE_{i,x}^{stat} for each biological position element x in the pair of biological statistical elements at different positions i in the alignment using the following equation:
$$Δ {E}_{i , x}^{stat} = {γ}^{*} ln ( \frac{{P}_{i}^{x}}{{P}_{align}^{x}} ) ,$$
where Pᵢ^{x} the probability of biological position element x at position i;
P_{align}^{x} is the probability of biological position element x in the alignment; and
γ* is an arbitrary statistical energy unit.

40. The method of claim 39, where Pᵢ^{x} is calculated using a binomial density function as set forth in the following equation:
$${P}_{i}^{x} = \frac{z !}{( {zf}_{i}^{x} ) ( z - {zf}_{i}^{x} )} {{p}_{x}^{{zf}_{i}^{x}} ( 1 - {p}_{x} )}^{z - {zf}_{i}^{x}} ,$$
where
$${f}_{i}^{x} = \frac{{m}_{i}^{x}}{M} ,$$
mᵢ^{x} is the number of biological position elements x at position i in the alignment, z is a normalization factor, zfᵢ^{x} is the number of biological sequences having biological position element x in a normalized version of the alignment having z biological sequences, and pₓ is a baseline mean frequency of biological position element x.

41. The method of claim 40, where z is 100.

42. The method of claim 37, where the calculating of (a) comprises calculating a statistical conservation value ΔE_{i,x}^{stat} for each biological position element x at each position i in the alignment using the following equation:
$$Δ {E}_{i , x}^{stat} = {γ}^{*} ln ( \frac{{P}_{i}^{x}}{{P}_{align}^{x}} ) ,$$
where Pᵢ^{x} is the probability of biological position element x at position i;
P_{align}^{x} is the probability of biological position element x in the alignment; and
γ* is an arbitrary statistical energy unit.

43. The method of claim 42, where Pᵢ^{x} is calculated using a binomial density function as set forth in the following equation:
$${P}_{i}^{x} = \frac{z !}{( {zf}_{i}^{x} ) ( z - {zf}_{i}^{x} )} {{p}_{x}^{{zf}_{i}^{x}} ( 1 - {p}_{x} )}^{z - {zf}_{i}^{x}} ,$$
where
$${f}_{i}^{x} = \frac{{m}_{i}^{x}}{M} , {m}_{i}^{x}$$
is the number of biological position elements x at position i in the alignment, z is a normalization factor, zfᵢ^{x} is the number of biological sequences having biological position element x in a normalized version of the alignment having z biological sequences, and pₓ is a baseline mean frequency of biological position element x.

44. The method of claim 43, where z is 100.

45. The method of claim 42, further comprising:
(c) perturbing the alignment by eliminating each biological sequence from the alignment such that M subalignments each having M−1 sequences are created.

46. The method of claim 45, where the measuring of (b) comprises calculating a change in statistical conservation of each biological position element at each position after each elimination of a biological sequence from the alignment.

47. The method of claim 45, where the measuring of (b) comprises:
(i) calculating a statistical conservation value ΔE_{i,x}^{stat} for each biological position element x at each position i in each of the M subalignments after each elimination of a biological sequence from the alignment; and
(ii) calculating a statistical conservation difference value ΔΔE_{i,x,δm}^{stat} after (i) using
$$ΔΔ {E}_{ i , x , δ m}^{ stat} = ( Δ {E}_{ i , x}^{ stat} - Δ {E}_{ i , x \vert δ m}^{ stat} ) * \frac{M}{ z} ,$$
where δm signifies a given elimination of one biological sequence from the alignment;
ΔE_{i,x,δm}^{stat} is calculated for each biological position element x at each position i in each subalignment in the same manner as the statistical conservation values ΔE_{i,x}^{stat} in claim 42; and
M/z is a normalization factor.

48. The method of claim 47, where z comprises 100.

49. The method of claim 47, where the measuring of (b) further comprises:
(iii) arranging the statistical conservation difference values ΔΔE_{i,x,δm}^{stat} into a perturbation vector \vec{ΔΔE}_{i,x}^{stat} for each biological position element x at each position i in the alignment, where
$${\vec{ΔΔ E}}_{i , x}^{stat} = \{ Δ Δ {E}_{i , x , δ m 1}^{stat} , Δ Δ {E}_{i , x , δ m 2}^{stat} , … , Δ Δ {E}_{i , x , δ m M}^{stat} \} .$$

50. The method of claim 47, where the perturbing of (c) creates M-dimensional space, and the measuring of (b) further comprises:
(iv) calculating a statistical coupling value C_{i,x,j,y}^{ev} for each pair of biological position elements x and y at each pair of positions i and j in the alignment, using
$${C}_{i , x , j , y}^{ev} = {\vec{ΔΔ E}}_{i , x}^{stat} \cdot {\vec{ΔΔ E}}_{j , y}^{stat} ,$$
where
$${\vec{ΔΔ E}}_{i , x}^{stat} \cdot {\vec{ΔΔ E}}_{j , y}^{stat} = \vert {\vec{ΔΔ E}}_{i , x}^{stat} \vert \vert {\vec{ΔΔ E}}_{j , y}^{stat} \vert cos θ ,$$
and θ is the angle between perturbation vectors \vec{ΔΔE}_{i,x}^{stat} and \vec{ΔΔE}_{j,y}^{stat} in the M-dimensional space.

51. The method of claim 47, further comprising:
(d) arranging the statistical coupling values into a statistical coupling matrix (SCM) having dimensions N×N×r×r, where r represents the number of biological position elements in the group.

52. The method of claim 51, where the biological sequences comprise proteins, the biological position elements comprise amino acids, and r comprises 20.

53. The method of claim 51, where the biological sequences comprise nucleic acid sequences, the biological position elements comprise nucleic acids, and r comprises 4.

54. The method of claim 51, further comprising:
(e) designing artificial biological sequences using the SCM.

55. The method of claim 51, further comprising:
(e) designing artificial biological sequences using a subset of the SCM.

56. The method of claim 54, where the M biological sequences in the alignment are functionally organized in M rows and N columns, and the designing of (e) comprises:
(i) randomizing the alignment to yield a randomized alignment that retains M biological sequences in M rows and N columns;
(ii) iteratively altering the randomized alignment to yield altered alignments;
(iii) creating a statistical coupling matrix for each altered alignment; and
(iv) determining whether to accept an alteration.

57. The method of claim 56, where the determining of (e)(iv) comprises using an optimization algorithm in determining whether to accept an alteration.

58. The method of claim 57, where the optimization algorithm comprises a simulated annealing algorithm.

59. The method of claim 56, where the alignment has a conservation pattern, and the randomizing of (e)(i) substantially preserves the conservation pattern.

60. The method of claim 54, where the M biological sequences in the alignment are functionally organized in M rows and N columns, the SCM comprises an SCM_{target}, and the designing of (e) comprises:
(i) randomizing the alignment to yield a randomized alignment that retains M biological sequences in M rows and N columns, the randomized alignment comprising an iteration 0 alignment (alignment₀);
(ii) obtaining a statistical coupling matrix SCM₀ for alignment₀;
(iii) swapping two biological position elements within one column of the randomized alignment to yield an alignmentₙ, where each swapping comprises an iteration, and n comprises the number of iterations;
(iv) obtaining a statistical coupling matrix SCMₙ for the alignmentₙ;
(v) obtaining a scalar system energy value eₙ, where eₙ=|SCMₙ−SCM_{target}|;
(vi) obtaining a scalar system energy value difference Δe, where Δe=eₙ−eₙ₋₁; and
(vii) determining whether to accept a swapping from (e)(ii) for a given iteration, where the determining comprises:
(1) if Δe≦0, accepting the swapping of (e)(ii) for the given iteration; and
(2) if Δe>0, accepting the swapping of (e)(ii) for the given iteration with a non-zero probability; and
(viii) repeating (e)(ii)-(e)(vii) until a termination criteria is satisfied.

61. The method of claim 60, where the non-zero probability comprises
$$exp ( \frac{- Δ e}{β} )$$
and β decreases.

62. The method of claim 61, where β decreases according to the number of acceptances (e)(vi)(1) or (e)(vi)(2).

63. The method of claim 60, where the termination criteria is based on the frequency of acceptances (e)(vii)(1) or (e)(vii)(2) relative to the number of swappings attempted.

64. The method of claim 60, where the alignment has a conservation pattern, and the randomizing of (e)(i) substantially preserves the conservation pattern.

65. The method of claim 60, where the biological sequences comprise proteins, the biological position elements comprise amino acids, and r comprises 20.

66. The method of claim 60, where the biological sequences comprise nucleic acid sequences, the biological position elements comprise nucleic acids, and r comprises 4.

67. The method of claim 60, where the scalar system energy values form a convergence trajectory relative to the number of iterations, and the designing of (e) further comprises:
(ix) selecting artificial biological sequences at different points along the convergence trajectory.

68. The method of claim 50, where the biological sequences in the alignment are part of a family of biological sequences, and the method further comprises:
(d) reducing the C_{i,x,j,y}^{ev} values to C_{i,j}^{ev} values; and
(e) using a clustering algorithm to group positions with similar C_{i,j}^{ev} values.

69. The method of claim 68, where the clustering algorithm comprises a hierarchal clustering algorithm.

70. The method of claim 68, further comprising:
(f) mapping the grouped positions on a representation of a 3D structure of a biological sequence in the alignment.

71. A method comprising:
(a) testing the size and diversity of an alignment of a family of M biological sequences, each biological sequence having N positions, each position being occupied by one biological position element of a group of biological position elements;
(b) calculating a statistical conservation value for each biological position element in a pair of biological position elements at different positions in the alignment;
(c) making a perturbation to the alignment that is not based on the conservation of a particular biological position element at a particular position, the perturbation yielding a subalignment having fewer than M biological sequences; and
(d) calculating a statistical conservation value for each biological position element in a pair of biological position elements at the different positions in the subalignment.

72. The method of claim 71, further comprising:
(e) calculating a dataset of values using the calculated statistical conservation values from (c) and (d), the values in the dataset being organizable into a square statistical coupling matrix.

73. The method of claim 72, further comprising:
(f) designing one or more artificial biological sequences using the square statistical coupling matrix.

74. The method of claim 72, further comprising:
(f) designing one or more artificial biological sequences using a subset of the square statistical coupling matrix.

75. The method of claim 72, where the square statistical coupling matrix is also symmetric.

76. A method comprising:
(a) calculating a statistical conservation value for each biological position element in a pair of biological position elements at different positions in an alignment of a family of M biological sequences, each biological sequence having N positions, and each position being occupied by one biological position element of a group of biological position elements;
(b) making a perturbation to the alignment that is not based on the conservation of a particular biological position element at a particular position, the perturbation yielding a subalignment having fewer than M biological sequences; and
(c) calculating a statistical conservation value for each biological position element in a pair of biological position elements at the different positions in the subalignment.

77. The method of claim 76, further comprising:
(d) calculating a dataset of values using the calculated statistical conservation values from (b) and (c), the values in the dataset being organizable into a square statistical coupling matrix.

78. The method of claim 77, further comprising:
(e) designing one or more artificial biological sequences using the square statistical coupling matrix.

79. The method of claim 77, further comprising:
(e) designing one or more artificial biological sequences using a subset of the square statistical coupling matrix.

80. The method of claim 77, where the square statistical coupling matrix is also symmetric.

81. A computer readable medium comprising machine readable instructions for executing the steps of any of the methods of claims 1-80.

82. A computer system programmed to execute the steps of any of the methods of claims 1-80.
